United States Patent Application Publication US 2025/0295137 A1 - sequence listing, part 13

SEQ ID NO: 13 - DNA, 1867569 bp, Latilactobacillus curvatus
  source 1..1867569: mol_type = genomic DNA
acatgaagactggtggcaagcagaaaaagcagccgtggaagccaactacgctaaaaacggtcaataaaaataaatagtttcagaataggatgatttaataaatggagaggattaaaaatacaaatttgtataatcgttttctaacatcgccaatgtacaatattgtgatgggattaaaacatcctattttgcttggacgatatttgaagtatcgaggctctgctgataaaccaaaagtagttggtcttgaaacgactttaaagcaaattacagtgcaaaaaatgtcggtcactcgttttggcgatggtgagttaaagtggctattgaatgagaatagctatgcttttcaagaaggatccgaagcattgagtgaacgtttaaaagaggttattacagcgactgatgcgcctaagttagcaatctgtataccagatgtttttaacggtctcagtcagtatatgccccaaaataaaaatgcttggattgaattaatagcgcgttacaatcatgcttggcgtccttatttacaagctcaatcagtattttatgatgcgaacatgagtcgcttctatattgaccgacgtgataaaagtcaaacggcgtattattttgaattactcaaacaaatctggcaagatcgtgaagtagttattgtagaaggacaagcaacgcgctttggtgttggtaatgatttattgagtaatgctaagtctgttaaacgcattttaggccctgcgcagaatgcgtttgatcaatacgacgctattatggatatcattaaggagcaggtagcatcagatgctttgattttaattgcattagggcccaccgcaacagttatggcttatgacttggctaagcttggttatcaggcaattgatataggacacgcagatttagagtatgagtggtatcaaatgaaggccacacaaagagttgctttaaatgatcggtatgtgaatgaagttgaaggtggaagtcaagtggctgaatcggaagctccagattatcatgctgaaattatcgcaacaatcagagaggattagttatggaatcaaaaaatcgtaatatttgtgcggtcttagttacttataaccgactagcattattgaaagaatgtttagcagcattagaaaaaaatgaaaatgttgcccacattgttattgtgaataataaaagtacggacggaacggctgattatttagcaactttatcggctgataagtttattatcaagaattctgatgaaaatctaggtggcgctggtggttttgcacatggcatggtcatggcttatgaacaaacagatgaccaatatttctggattatggatgatgacacgattcctaattcaaatgcagcacatcagttattagataaagcagcattcttaaaagatgattttggcttcttatgtagtaatgttcgctggatggatggcacatcatgtaatatgccaatgcctgcatttgaatggccagacaagattaatgatgggttagtgtctgtcagccaaggaacatttgtttcggttttcttaacccgggaaatagtaaaacaatatggcgtgccaacgcaagagcttttcatctggggagatgatactgagtatacaattcgagtcagtcaggcgaaatcatcttattttgtaattgacagtgttgtggtacacaagacacctaacaatttaacggatattactatttttaacgattcgaaggatcgtattaatcggtatttttatctatatagaaacttaatttacatcagtaagttatataaaggaaaaggggcaaccatcaaattaaccattcgtcatattctttatgcattttcaacgttaggaaaagctaaggatagtcgttttaaaagggctggtgctatcttaaaagggacgtttactggtttagggtttaatccgcagattagacgagttgattaatattagatagtaggtagggtatggaacagttattaattttaattagtgttattcaaaaaaatattttaaatatcccattcttctcacaagctgcttttttaggcatacttattattctttatcgacggttagtggaccatatttctttagaaccgttggataatttaaagcttagacactatgccttcatcgggttgcttgcacttagccaactactagcttttattggattaacaaatgaaggctatggaatcggtagtattttaaagaagttcattattgcgatgattacagttgctaattttttgattctatattttgttatgaacctattgatgcggaatgattatcagattaaaaagattgtaacggggaatttttgggcatttgtcctattgattggcatttgtctggttcaaattatttatgtatttttaggtggtcgtttagagagtatcgtcgaattaatcggacggtatctggaatatcataatattctaaatcctggttcttttgaaaaaattagttacacgcaaagtacgcaacgggtaaatgggttatatgcggaatctggatttttagcaggagtattggcgattggttttgcccccttcatcattagcgcgatgaaaaataagatcaacctattttttccgaatagtcgctatcatggctggttttattatgggttattcgctgtattgatgggcgtgttggtgcttgctaagacaagtaccggtattctggcagtcgttgtaatggcgttacttttactatgggctgtcaaaggtcgggaacggttaaatctaatcgttctgtatgttattgctggattattattagcattaatcgtaatgagagtaccagcgttaaaaaatatgttattaagttttacagttggtaagacggattctgattcaacaacaatgcggctattagcaacacaagcggtgtttattactgttttaaagaatccgttgattggtgttggctttggtcaaactagtcattttaatttcatcaatgcaccatcatcagttaaacaactagctgaatatcaattatttttaaagaataaagaatttccagatcaaagtgcgtggggagctgtgctagcgcaatttgggctgattattggaatcattattgtgatatatattattcatctattactcgatttgaaaaaatcaacgaaatggttacaaatacatcaaatcacaggatatcagtacgatcaagcgatttatgatagtgccgtttatttcacaattatcttcttagtattaggaatgttatccatccaatggtcatttgatttatttattttaatgtttttcttctttgttaactatagacactatttgaatcgtaaaatcacaaataatttaaaagatggtgaggtatatatttatgactaattatttagtagttggttctggcctgtttggcgcaaccttcgcatatgaagcggccaaacgtgggaaccatgtaaaagtaatcgaaaagcgggatcacatcgctggaaacatctatacaaaggaagttgatggcatccaagtacatcaatatggtgcccacattttccataccagcaacaaagaaatctgggaatatattaaccaattcgcagaattcaaccgttacaccaatagccctgttgccaactacaagggtgaaatctataacttgccattcaacatgaatacgttcaataagttgtggggcgtagcgacacccgctgaagcggccgctaaaattgctgaacaacgcaaggtgttaggtgataaaacacctgaaaatttggaagaacaagccatttcattaattggaacggatatctataaaaaactgatcaaaggttatactgaaaaacaatggggccaaaaagcaaccgaattaccagctttcattattcgtcgcctcccagtccgtttaacttatgacaataactacttcaacgatacataccaagggattccaattggtgggtatacacaaatcatcgaaaagatgttagatagtgatttaatcgatgttgaaactggtgttgatttcttcgataaaaaacaagaatatattgatcaatacgataaagtcatctttactgggatgattgatcagttcttcaattatcaattaggcgaacttgaataccggagcttacgttttgaaacggaagaaatggatattgataactaccaagggaacgcggttgttaactacacggacgctgaaacaccatacacgcgggtgattgaacataaacattttgaattcggtaaaggtgacaagaacaagaccatcgttaccaaagaatatcccgctaactggtcgcgtggcgacgaaccttactatccaatcaataacgataagaataaccgtttgtacaaagcttaccgtgacctatcatcgacagaacccaaagtggttttcggtggtcgtttaggccaatatcgttattatgatatgcaccaagtgatccatgcagcattacaagtcgttaaggacgaattaaaggattaatcaatgaagattattaagaactatctctataatgtgttctaccaggtatttgtactgttagtaccactcattacgatgccatatattgcccgggttttaggcccaacgggcgttgggattaactccttcaccaattcaaatacgcagtactttattttaattgggagtatcggggtatctctatatggaaatcggcaaattgcttattatcgagataatcgagcgaaagcttctcaaattttttgggaagtttttctaatgcgattagtgacgattgtggctgcattagcacttttctttggctttttatggtttgttaaagactatcatcaagcttacttgatgcaagcgattttgattgttgcggcagcatttgatatctcgtggttctttatgggctttgagaacttcaaggtaacggttttacgaaacatcatcattaagttaatctcgcttgcctgtatcttcatatttgtgaagaaccagggggatttaacgttatacattgcaattttatcaatctcgcaattgattggtaatttaacgttattcccatatttaaaacactatattgatatgcctgactggcataaattaaaaatttggcggcatttccaaccatctttagtcttgtttattccgcaaattgcgacacacgtctatttaatcttaaataagaccatggttgggaaaatggtttcggttgaagctgccggcttctatgataattccgataaaattgtcaaaatggttttagcaatcgtgacagcaacgggaactgtgatgttgccgcgagttgccaatacgtttgccaaaggtgatcacgaacaagtgaaaaagtatctttaccagtcatttgattttgtcagtgcggtttcagtccccatgatgtttgggattgcagcgattgcgccgaactttgcgaccatgttttttggcaaggatttcgccgctgttgggccattgatgatggtcgagtcgatcgtgattctaatgattgcctggagtaatgtcttgggtgtgcaatacttgatgccaaccggacacaacaaagaatttacgatttcggtgacggttggcgctgttgtcaacattatcttgaatgtgccaatgattttatggttagggacacaaggtgcaatgattgcgacagttatttcagaaatcagtgtaacggcctatcaattctatgtcgttcggcatgagttaagtattcgacaaatgacggcggaagtgtggaaataccttttaggtggtctgatgatgtttgccgtagttctttatttgaacctaacgctaccatttagtatgttacaactagttttacaagttggcgttggtattttgttatacggcgttgtattatggttaacgaaacctaaattattgaattatatcaagcgaggagatcactcatgaaaattttaatcactggtgcaaatggtcaattagggaccgaattacggcacttattagatgaaaatcaaattgaatacgtggggacagatgctactgagttagatattactgattcagcggcagtcacaacttacttcgaaaagaataagccggaattggtttatcactgtgctgcttatacagctgtcgatgctgctgaagaagaacctggcaagtcaatcaattacaaagtgaacgtggttggaacgcaaaacattgccaatgctgctgaagcaatcggcgcaacgcttgtttacattagtacggattatgtctttgatggtacgaatgatcaaatgtacacagaagaaaccccagctgcacctaagaatgaatatggtcgcacaaaattggctggtgaagaagccgttgcaaatacgatgagcaagtattacatcatccggacatcatgggtctttggtgaatatggtaagaactttgtttataccatgttaaaccttgctaaaacacatgatcatttaacggttgttagtgatcaagtcggtcggccaacttggacccggacattggctgaattcatgttatattcagttaaaaacgacgtcccttatggtttataccaactttcaaatgacaattcatgtacttggtatgaatttgcgagtgaaatcttgaaggacaaagctgttgaagtgagtcctgttacatcagacgaatatccccaaaaagccttccgtccaagacattcaattatggatttaacgaagatcaaggcaactggatttgaagtaccaacctggcaagatgcattacaaaaatttatggcaaaaatcgattagtataattaaaaaggtgagtaatcatatgattgctcaccttttttaattatactaataacgcactaaacttcttttgcaccttaaacttaatattattagccgttcgccgtgtgatgtttaagtctgcggcgatttcttttagggtggcgttgtagaagtagcggaggactaagaagcgtttttcgcgtggtgtacaaacttgatagagacgctcgaagaggtcgttacagatggcagcctcttctggattgcagtagggatcagcaacttggtcgagatagtccatcacggaatcatcatcgtttgcccggttaacgaagccaattcgtttgtcatggttattatccttgcggaaggtcatcataatcgcccatttaacggcctgatacgcgtaaaccatgaagcggtgggtttcgacttcaatattgcctgggaaatgatcgtaggcttcgacaaaggcaatgacgccaatttgatagagatcggcgaagttgctacgttgtcttggaacgtggagatctttgagaacgccatagatgagggtgtcgtcttgtataataaaatcaaaagcagtttgtaaatctgattgggtcattgtaaagcatcctgtctactatgagctcacagtgtgaattaccggtaagttcactatagcgggtttgcataaagaagggtaatcgccgattttagcggtaaatcaatccgtttcagctttaatttgcgcaaatgcattgaaatacaaatgaaaattattgtaaatagcgacttcgggttaatttataattggcgtaatttttgaattagttctttaacacttttgatatagcactgaatgtcaaatacgctgaattcggggtattcatggattacggcttggtaaatgaaattttccttatgcattttaagtgcgttgagtaatccgagtagttcagtagctgttttcggaacattcgagcacagatggcaatggcaatcatcgaagcgatggacgatgcttggcttgaaacaagtcttgagcttgatttgatagccgaaattagtggcacacacagtgagacagccaagttggactttgccaatggctgcacattgatgaatttcagtatcgatttgacggcctttataagggaggatacaggtacagtcatttagcaatgtaacgtagagatggttatcgctaacttcgtaatcacggacgtagtggagcgctaaccacggtgcgttttgatgagccgtgccacttaatggtaaatactgatattcgccattgatgtgtggaatcttacgataccaattgaaacaatggcaaaggtgccggggttgtgagaagtccatgatctgatggcgattataagcgcgcattagttgccgggtagaacgcggactaatttggagaccggttatgcggtctaacacaagactttgcgattttttatagggaataatcaccattgtgtcactcgtaatactagtttggtaagaacggggaattgacgattgatccagctcacagaagttataatcaacaccgcgcttgatgatgagtggcacaggaagacactcgtgatatgtattgatatgtttgggatgtagtagaaacatcgaagacctcctttattgttaacctcttgagaataccaatgatgggaatcgcttacaaaacaattgtgaaaagattaataaagtcctaagcgcttgttaatcttttcctcattttcggcatataattggtgcaaatccacttttttatggcatactgttattagactataagttatgggggattttagtagatgaaagtacgtaaagcagttattccagcagccggactaggcactcgttttctaccagctaccaaagcgatggcgaaggaaatgttgccaattgttgataaaccaacgattcaatttatcgtggaagaagcaaaggcttcagggattgaagatatcttaattatcactggtaagggcaaacgcccaattgaagatcactttgattcagcaccagagttggaacaaaacttgaaagccaagaataagaccgctatgttgaagatggtcaacgaaacgactgatatgggggttaacttgtacttcattcgccaatcacatccaaacggattaggggatgcagtgcgccttgcaaaatcattcgttgctgacgaaccttttgtcgttatgttaggtgatgacttgatggatgataaggtgccattgagtaaacaactaattaatgaatatgaagaaacacatgcatcacaattagccgttatgaaggtcccacataatgaagtggacaaatacggcgtgattaacccagaaaacaaagttaaagacgatttatacaacgttaagaacttcgttgaaaagccagatattgataaggcacctagtgatttagcgatcattggtcgttacttattaacccctgaaatttttgatgttttagaaaaccaaaaaccgggtcttggtggtgaaattcaattaaccgatgcgattgatgaattgaacaagacccaacgcgtcttcgcccatgaattcaaaggccggcgctacgatgttggtaacaaattcggttatctagaaacaagtatcgaatatgggttaaaacacccagaagtcaaagatgacttgaagaaatacattatcgacttggcagaagaattaaaaaaagacactaaaaaagaaaataaataacctgtaaaaaacgttcaaccactccgtacattggagtggttgaacgttttttgttgttttaaatgataagcccttcgcagtgatccacctcatgttgaataatctgtgcaatccagcctgagaaagcctgcttgtgcggcttaaaggattggtcttggtaagtgacctcgattgtttcataacgggttgtcggacgttcaccggtcaatgaaagacaaccttcagttgtttggtatggtttatcctgacgcacaatctgtggattcacaagaatcacaggtaagacgcccatttgaacgatgataatccgtttattgatgccaatcatgttggcagccattccgacgcaacgttctgtgttggcttgtaaagtatcacgtaaatcggtcagcacatcggtatcagctggtgttgctggaactgctttttgagctaagaattgagtgtcacgcataatgggtttaatcatagtagactccttgagtagtagttcttccattatagcagaaaataaactcattcaattctcatttagtgaaagtccgccttatctgcgggcttttttaatgcgattatttagggattagagtctgcttttcaatattgtggtaaaaaattcgacaaatttggattttatgcttataattattaacatactattataaaacgtctaatctaatcttaataacgcgttaagagcgatgagagaagttggtcaggcattaggggaggatcacatgaagaaattactcgtatttttaggcagctgtttactcgcaggcttatttgtatttgggagtcaagtgaataatcaggttcaagccgctgaaaaaacttatgaaatcggtacggatgtgacctatccaccattcgagtttgcgaatgagaagaatcaatatgtcggtattgatattgatatcatgaaggcagttgcgaagtccgagggctttaaagtgaatattaaaccgttgggattcaacgcagcggttcaagccgttcagtcggaacaaattgacggcgtgattgccgggatgacaattacacctgaacggcaagcaaaattcgatttcgctgatccttactacaagaccggggttgtaatggccgttcaaaaggacagtaagattaaaggcttagaagggttgcgcggtaaacgtgttgcgattaaaacagggacttccgctggggcctatgcgacggccaaagcgaaagaatatggctttaccaccgttacgtttgatgattcagataatatgtataatgatgttgtgaatggtaattcggcagcctgttttgaagacgagcccgttatgcaatatgggattaagacgggcttgaaactcaagattgtcaccaaacctgctcaaggtggcgaatatggattcgccgttaagaaagggagcaatcctgaactcattgctaaattcaataaaggtcttgctaaattaaaagcaaatggtcaatacgacaaaattaaagcaaaatatttaagtacagaatcaactaaaaaagcaaccgttgatcacagcttttttggattattgaaagaaaataaagatgcgttgttgagcggtttaggccagacgttattattaacagtcattgcgattttcttcgcaaccatttttggggtcttcttcggtttactcggcgtattacctaaccggtttgcgcgtggcgtttcagatacggtcatctatattttccgtgggttaccactcttggtgcttgcgttattcatctatactgggattccaagtttaactgggcagaagattccagcgattgtggctggggtcatcacgctgatgttcaatgaaggggcttatactgcagcctttgtcaaagggggcattggcgcggttagcaccggacaaatggaagcagcgcggagtttagggttaccatatggtaaagcaatgcggcgcgttgttttaccacaagggatccgcattatgattccatccttcattaaccaattcatcatcacattgaaagatacgtcaattttatcaatcatcgggattctcgaattgacacagacgggtaaaattatcatcgcccgcaaccttgaagggttcaaaatttgggcaatgattgccttaatctatctgatcgttatcacgttactcacgtggttatcgaagtacattgaggggagaatagataactaatgaatagaattgaagtgtctcatcttattaagaattacggcagtaacgaagtgttaaaagatttggacttaacggtcggtgataatgaagtggttgtcatgatcggcccctcaggttcaggaaagagcacgttcttgcgctgcttgaatcgcttagaagaacccacgagtggtgagattatcgttgatgggtacaacctcagtgatcctaagagtgatttgaatcaaattcgcgaaaaaatcgggatggtattccaacactttaatcttttcaaaaatctaacggtcgctgaaaatattacactcgcaccagtggaactcggtaaaatgacgccggcagaagcaaaagaaaccgccaagaaactacttgaaacggttggtttatcagagaaattcgatgcaaaaccacaatcgctatcaggtggtcaaaaacaacgggtcgccattgcgcgtgccttagcgatgaaacctgatattctcttgttcgacgaaccaacatcagcgctcgatcctgaaatggtcggcgacgtgttggccgttatgaagcggttagccaaagaagggatgacgatggttgtcgtgactcacgaaatgggctttgccaaagaagtggcagaccgcgtcatcttcatggcagatggacacattgtcgaacaaggcacaccacaggaaatctttgacaccccacaaaacgaaagaacaaaagacttcctgaacaaggtactaaatgcatagcgtgcgtttcaaaaagcacgtttaacgccaaccaaaaaagcggcccaccattacttggtgagccgcttttacgattcttaggtctttagaatgttagaatagaaataggaactagtagagaaaagagggatgacgatgcgattaggcttaaaagcagggattaacgatcagcaaattgctgatcgaatgcagtatcagccaacgtattttgaatttcatctaacagccgaagatgtcacgccaactgggctagtacgtttacgcgaaaaaattcgttatgtacgcagtcagcaggttgaacggattattttacaccacccaatgagtttcgaagggcatcatattgaactgtcgatgaatgaagcaagttcgccagcccgataccgctttttatggcaatcaacactcgatttattgcagttagcgaaagctgaagatgtccaactattggtgcatggctcttatgatgatccaattgaagaattgacgacgggttacagtaatattacggatgccattcgtgttttgttcaagcgcctcgattatttacagcggattggcggacaaaatattatgttcgaaaattcaatttcaccgattttctattatggcaatccgatttttgatcaggccatctttgataaaggttaccgcttagcgtttgatacgagtcactgttttatcaagttgcagggtgatcagaatgctttcttgcagagtctggcaactttgcgtgagcacgtcgttcattatcatctggttgattcgatgggtttgaagcatgatgggttgcaattagggactggcaaaattgactgggcccgcgtattgccattgttaaatcctgatgctagttcgatctatgagattcaattagccgatcaaaatgatgcacgagaaatgattgcgagtcatcgttatttaacgcaacttgaacaaacattatccgagtagaattttgtcagcagcaacgcgaaaaccaaacaaaggatagtcccccgtctttgtttggacatacatataatgttggtagtagtttttttgatttaataataggctaaattcccactgcttcagcggctttttgtctgcggcctttaactgcagtaatagtcgtggctgttcgtcaacgacggcgagctcaaagtgggcgataggttggagctcttcagggccttcgaagtagatgccatcgtttttgggtgtatcagctaatagctgtagtaagtcaatgacgcgcatgataagtcgtcctttctaatagtgcgaaaatcccggcaataatcagccaacaaacacccgacaagctagcggcgatggttaggataattgccattggtgttagaataccaatgagccaagtcgtggtgttgactgttggcacaaatgaaaacagaccagtaacgaggcagaccgcgatgactgtggcaataatccctggaatcgtgcctttaaaatcagctgcggataagtcaaaaccaccgatggcaatcatgctagttaagattaaccagagcaagagagcactcggttgcgtcgtccagagctggctgaacaaggggccgatggcgtttaactgccaagtgggatgttcagcaaaggtcatccacgttgcaaaagtgggccgtgctaataaccaagtcagtccgaaaatggcggctgaacaaccaaaaatcggggcaatcccaatccagagattaccaattgttggccaaagacggccggaatggtatcggtgattgacatggccaagcgagtgatcgggattatcccgtagatttaattttaagagttgtatatcgataatttggtgttggaagattaaacaggcaacagcatggctgagttcatgaatcacagtgcctaggccgccaattaaaagttgtgagtaatcccaccaatgggctaagcgccgtttagttgaacgattgattagtgttaaaatcccggcaaaagctagtggtagcgcaattaccagtaaacaattaagtaacattgattgcaatatttgcgataagttaaatgaattgggcatgataactcctttgaacgactttatgtaagcctacaccaaagtttatcgcggaaacaaggggtgttaatcaatttatgtaaaacgcaaaaaaagcccccaaatcagattcgatttgggggctgtatgctgcttaattatttgtcagaaaagattggtgtttcaatctgttcaacgtatttggcaccaactggttctttgtagagttcaattccttttttaataaacatattggctgctgcgattttagtcatcgcacttctaactgtttcggcgtctaagttgtcatcaatattgtttaagcgcaatacacgactcttagcatcactgtttttaaattctaagcaaagttgtttcatcttgaattcctcctcaaagattggtatgttttttatttagcgatataagcagatttagtggttagagtagctgttgcaaatgtgtcacctgcgtggagacttgcgagggcttcgccaactgcttggatttccgtggcttgaacgtcttcttttacggcggtcatacgacgttgtaaactttcatttggatagtctgtattttgtaattcaaaagcgatcgatgttgctaaccatgatgtttgcatgtggattcctcctaaagattagttgtaagcgtcaccggtgaatgacttacgctaatgagtaatgcacgatgccgataaaatggtaaaataatctcagcttaccaagcggatttctaaaaaaaagttaaagaaattgtgaattaccagacgtttcatgaaaatttagttatagtaataattagacttatagatgaagagggatattatgcaagaagtggttattatcagtgcaaagcggacaccgattggtaaattggggggccaacttgcaagtttaagcgcggttgaattggggacagttgctgctaaagcggcgattgaagcagccgggattgatccaactcagattgatcaagcaattttcgggaatgtcttacaagccggttctgggcaaaacgttgcacggcaaatcgctttgaagagtgggatgacacaatcaagcacagcaatgacagttaatgaagtttgtggttccggcttaaaagcgattcggttggcgcagagtgcaatcgtcatgggcgatgctgacatcgtcttagttggcggtacagaaagtatgtcacaagcgccttatttgaataaacaaatgcgttttgggagtaaatttggggaccaaacaatgattgatagcatcagtagcgaagggttaaacgatgcgtttacgcaccagccaatggggattacaggcgaaaatgtagcagctaaatacggcattacgcgtgaaatgcaagacgcttttgcactcgcttctcatcaaaaagccgcgcaagcgacccaagctggttggtttaatgaagaaattgtgcctgtaacggtgcaacaacgcaaagcaacgcttgaagtacaacaagatgaaggtatccgcccaacgacaaccatcgaagcaatggcgaagttgcgcccagcttttcaacaagatgggactgtaacacctgccaatgcttccggcattaacgatggcgcctctgccatgatcgttatgagcaaggaaaaagctgctgcactcggattagtttaccaagccactttggtcggctatcaagaagtcggtgctgatccagattacatggggtacacgccggtcgatgcaattcaaaaattattagcgcaacaaaatcaaacattagccgatatcgatttattagaaattaacgaagcgtttgccgcttcaagtgtggccgttcaaaatgggttacaagtcgatcctgctaaagttaatgtggccggtggcgctattgcgttgggccatccaatcggtgcttcaggtacgcgcatcatgacaacgttaatgcaccaattgaaacggacgcaccaaacaacagggattgcttcgttatgtattggtggcgggttaggaattgcttttgaaattcaattaaatgaggcatggtgtaatgaaaaagcctaagttctatcaattaacgaaggatgaacgtttagcaacgcttgttgaacaaggtcacctaagtcagacggatgctgattgtttagcagctgcagaacccttgtcagatgagatcgctggtaatatgattgaaaaccaaattggccagtaccaagtaccgcttggtgtggtgcaagatttattagtcaatcagcaagtctatcaagtcccgtttgcgatcgaagaaccatccgttattgcggcggctaataatgcggctaagatggcacgagctaatggcggctttgtgactgaacaactgacgcggctgatgactggtgaagtcgtgttagagaagctagttgacttagtagcggctaaagcttggattagtggcaacaatgaccatttatttgaagttgcgcgggctgcgcatccatcaattgttaaacgcggtggtggtcttcaaaaaatcacgccgacgattattgacgaccgctttttgaaacttgaattgcaaattgataccaaagaagcgatgggtgccaacattgtgaacacaatctgtgaagccatcgcacatgctgtgcaagaacagttgggcggcacccttttattgagtgttttgaccaatgccgcgtttgaatccgtggtgaccgcaagtgtgacgattgatccagctaccttaacaactgcgacgcttgctggcgaaacaattgccgaaaagatgattgcggcgagtgactttgccaaagtggatgtggcgcgcgcagcaacccacaataaagggattatgaacggcatcgatgcagtggtgttagcgacgggcaacgattggcgcgcaattgaagccggcgtgcatagttatgctgctagaaagggtgcttaccaaccgctttcgagttgggaatggacaactgatcagcaactacgcggtcgaatcgaactgccactgccagttgggatggttggcggatcgattggtattctaccaaccgtgcagattaatcagcgcttgttaaaagttcagaatgcgcgtgaattagccggcattatcgcagctgttggcttagcacaaaattttgccgcgctcaaagcacttgtgtcagacgggattcaaaaaggacacatggcgcttcaagcgaagtcgttggcgattgccgctggcgcaaccgagactgaattaacgcaattattaccattattattgaaagcgacacatttaaatacagcaacagccaccgagctgttagcgcaactgcgtgctgaaaacaaatagattggaagattattatgcaaatcggaattgataagatgggcctttttacgcctaatacctacttagatttagtgatgctagctaacgcgcgaggcgttgatcctgacaaatacacaattggaattggtcaagatcaaatggcaattgcccccctcagtcaagacagtgtcacaatggcggctaacgcggctcttgaagtgttggatgatgataatcgtgattcaattggtttattaattttaggcactgaatcaggaatcgatcagtcaaaagccggtgccctttatgtgcaacgcttattaggattaaaaaatgctcgtgcttttgaaattaaagaagcttgttacggggcaaccgctggtttgatgaccgcttatgactttgtagcggcgcatccagagcaaagagcattagtcatcggttccgatatcgcccgttatgggctggatacaccaggtgaagtgacacaaggtgctggcgcggttgcaatgatcgttagtgcagcaccacatttgttggcgttagaaccggcaacggccatccacagtgatgacattcaagatttctggcgccccaactattcaaaagaagcttttgcgcgtggcaaatattcaactgaacaatacatcgaatttttccaagcaacttgggcagactatcgcgctcaaactggccgcacaatctcagatttcaaagccttaacgttccatttaccatacacaaagatgggtttgaaggcattgcggacaatcctgccagaagcaacggaagcagaacaagcacatttattagaccgttatcaagaaagtacattgtatagccgtcaaattggtaatatctatactggcgcgttatacctaggcttcctttcattgttggaacaatcaacgcaattggcagccggcgatcgaattggtttattcagttacggttcaggtgcaatcagtgaattcttcaccggtattttgcaacccggatttgaaaaacaattagccggtgcggaccacaaagcaatgcttgctgcacgacgtcaattgacgatggctgaatacgaaaatcaattccaagcagaactaccagaagacggtagcaaatatgaaattgatttggcaatggacaacgcgccaatcattttaaaaggtgttaaggaacacgaacgcaattatcaagttagagattaataaaaaaacagctatgtatcctaaaaactgccattaacagtattgttaatggcagtttttttagctatttctgataaaaataacaagtcagaaatgatggaaaaacttttttaaatttaagagcattttgattgtatccggtcacagaaggtgctatattaatggtgaggaaagatagcttggtaagtgaaaccaagttagctttaaatagatttaccactttaaaacacaagcaccagatttgaatgtacgacacatcaagatttaaagtacgaaaaagaaattgcaaggcgtggttccaatggaaacataagtgtaactcttcgtagtattaagatctaagtatatcggaggctgatgtctgttaaagaatatcgctcaagtagtaaacacgaatttaatcgtcatcgctaaaactgcacatgcgggtcaaagatagacgaccaaactagatcgagtgaaacgattagcagtgggctagaccaacgattaaaaacaattgaatagaagtatgaggtgtaacattatccagaatgtaaaacagaatcagctcgcaacaaccaagctatcaacctcaacctaggggattcaagcatatcaaagcttgaatcctttttttatgctcaaaatacaatataaatagccattcactatagataacaaatgaatggctttatttttaattaggcgtgggcttgcactgcctcaatcaacgcgtctaaattattcacaatcgtgccgttttgtttaattaagccggttgtgtaaaggtttaagtaatggaattggttttcggcgatctcttgtaaagctgctagtttttgcggatttgtagcaccttgttggcggctgtcggtgtataatccgatcattggaatttggcgaccgtatgccacaccgatttcactagcaacgccaacatcgatggtaggaccatccaaaacagcaatgacgagatcgctagcaacgagttcgtctgtatcggcttgtgcgatcatttcagagctggcataagcattcttgtcattaattgcggcgttttcttgtgggagatagatatcgacaccaggaatcgattggcgcagttgagcaacaaccttagcgttataatcaaagtctgctgctgagaatagagcgtttgcgaaataaattttcataagaattcctccaagttgattttctttattgtatcaaattagtggtgaaatgcggtacaattaagttaatcagttttggaaggggattcacaatgcgcgagattcaagaaacaccagggcaagtaacgtttaagtcagcttggcgagattattttaaaggttattttgattttacggggcgaacaacacgtacgggttattggtgggcgatgttgattttaatgattgtttggttcatgccatttttcgctttgctatttgcacaagctgcaaaggtgcaactgaagatgagcggtgcattagtgctgtacataatcgttatcgggttgcttggggtactcacgtttattccaacgttggcgcttagtgtacggcgttatcgggatgctgggttaaatggtcgcggagcaattgtattgtggttattgaacgggtttgcatcccgttttacatcgggcaatcaggggcgcgcatggacgttaatttcggcgttaagcggaagaaagtggttgtgaaagcacgtttcaaaaagagtgcgtcacaaccgaaacgatctgagcattaaaaaatgagagtgtggcataagtcgggtatatcctgaggattaacacagaatggtgaaggattgcttcaagcaatcgtttgccattcagggttaaccggaaggatatgacttatagaacgcgtttaggcgattaaagtccaaataaaaaagcggtccatcaacatgtgtttgttgatggaccgcttttttgcgttatagatcgcgttttagtgttaatgtcacaactgcttcaactcgtgccgtttgggggaacatgtccaatggttggattttttccacttggtacgtatgcacaagggcttttaaatcccgtgcaagggttgatggattacatgagacgtagacaaatttcaatggccgactgtctaaaatggcatcaattaatttttgatctaagccagtgcgtggtggatcaaccaccaaggcagttgggacgaagccattatccaaccattctgggaggaggtcttcggcagcccctacggcatattcaacgttttgaatgtcgttgatggctgcgttgtgtttagccgcttcaattgaatcggcaatcgtgtccatgccgcgcacttctgcgacttgattggcaagactcaagccaattgtacccaccccacaataagcatcgacgaggcgatcttcaggtgtgagatcaagtgcatcttgaactaagttatacatcttagccgtttgaactggattcaattggaaaaaggcgcgggcagtcaattcgaagtgaacgtcgtttaaagtttccataatcgtttcttgaccagccagatgaatcgtttggtcgccccaaacgagcacgtttttccctttgttgatattttgcatgattgaaaccacttcgggcaattcagcttggatggctgtaatcaatgcgtgcttttgcggtagtttaggggagttggtaatgaaggtcagttgcgcttcaccggttgaaaaagattcgcgaacgaccaatgtttttaaaatcccggcattcttagtttcatcaaagacgggaattccgagtgattcgactaatttcaagacggttcggatgattttcattgttaaatcggtttgggttgcgaattcaggcaaatcaattaaagtatggctacttggagcgtataagccagctgctaaatgaccgtcgatttcgcggacttggaattgtgctttgttgcgataatgccaggggttttccattccgactgtatcggtaatattgtatttggcgtagccttgtggtttgaatttttcaagcgcttggacgacgacgtcttttttgaaggcaagttggccaggatagcttaagtgttcaagctcaatcccaccgacttggccgtaagtggcatccttaggggtaacccgttgtggtgaagcttggcgaagtttgtggacttttgcttcaatgaaacgaggggcaacgttggtgacttctgcgacaaccacttcttcaggaagtgcgcctggaataaagacaattttgcgtttgtaatagccaatcccttcaccattgatgccgattcgtttaatcgtcaatggaaaacgttggccgacttcgacttggtttgtttgttctggcatttaatccgctcctattaatataaaataatgatactcgtttttctcattgcattcagtataacagacttagcactgaaaaatcgcttcaatagtgggaattaagcagtgacttttgtccgggtgcgccatttatgctatgctacaggaagtcaaagtaaggagcgaagccacatgaatttttgggaacgaaatcaatttttaatcgccatgctgattgtactcggaattggcgtttatgccttccaacacaagagcttaccactgatcatcgggactttagtgctcgccgtcgtggtcattggatttaaagtctatttaaacatcaaagcaacacgtaacaagggagaataacatgccgaagattaccaaaataacggcacagaaaaaatcaggccgctataatatttttatcgatgagcaattcgctttcggcgtgaccgagagtgtcttgattaaataccgtttagcgaaggatttagagattgatagtcaactgcaacgcgacattcaaaaagacgatgataatgccaaagcgtatcaattggcgctcaattatctgagtcaccaattgcggacggaaaaggaactaacgcaatatttacgcgaacacgagatcactccagaagggatccagactagcttggcaaaattacgcgagttacattatatcgacgatcaggattacgccgatagctacgttcgtactgtgattaataccgcggataagggccccaaagtggtccgccagaaattaatccaaaaaggcgttagtgctgcccatatcgatcaagcacttagtcattattcagtggatgatcaagttgcggttgggttagcagctgctaagaagttggcgaagaaataccgtcatagttcattctttgaacagcagcaaaaagtcaaacaaggtttaatgcaaaaagggtttggcggtgacagccttagtttaattattgaagcgttggcccttgaagccgatgaagatagtgaagctgacgcgcttgctgaacttggtgcaaaaaaatggcgccgttatcgattactcgaaccacgagaacgccggatgaagatgcaacaagcgttgtatcggaaaggatttaatattgatgcaatcaaccacttcatcgacgaacaagaactatcagatgacaccgagtgaacgggacgcgtttcaaaccgcgtttatgacttggtatgatgaaaatcgccgggacttgccttggcgccagaatcaagagccctatcgtgtctggctatctgaaatcatgctccagcaaacgcaggttcaaacagtgattccgtactatgaacggtttttggcgacttttccaacggtggcagacttagcggccgctccagaggacttattaatgaaaacgtgggagggacttggttattattcgcgcgcgcgtaacttacaaaaagcagcgcgccaagtcgtcgacgattacaatggtcagtggccaacaaccgcggctgaattagaaaagttagccgggattggaccgtacacagcgggcgctatcgccagtatttgttttggcgaagtcgtcccggcaatcgatggcaatgcttttcgggtgttcagtcggttattgaaaatcgatgctgatattgccaacccaaagaaccgccacattttttacgatgcgattttaccgctgattcccaaagatcgcccaggtgactttaaccaagccgtgatggattttggctcgcaagtttgtacggcaaagaatccaacggttggtgagacggcgttagcaccgtttttccggagttatcaagatggtaccttattggattatccagtcaagacgaagaaagcaaaacaaaaaccagttgcgatgtttgcagttgtgattcgctcgcaaaagggcttattatttcaaaaacgaccgagtaccggtttattagcgaacctgtccacttatccactagtcgctgcggaagacttgcaagtaactgacgatgaattattgacaccggaagaacaactagctcgtatcgaagcttattttaaagaggcttttgcgctagaattgcagcaattacatgaatcaggtttaaaacctgtggtgcacgtttttacgcatcttaaatggacaattacccttttagaagcacaacttgcagcagatgccgacctcgcctttttcccaggccaatggtataccgaggcacaattagctgacgttgcattaccgactgtgcaaaagaagttagcggcacgtttggcaaccaattaatggtagaaagttttaggtaaatttgcgagtctttgctataatgataggtgattatgaataataaccttggaaagctgggtatgtcgatgagtattcccaaagaaggcgactatatagcgattcaaagttataaacacgatgggagtttacaccgcacttggcgcgatacgatggttttgaaaaccagcgagaacgcagtcattggttgtaacgatcataccttagttacagagtcagacggcagaaagtgggtcacgcgggagccggcacttatttatttccataagaagtattggtttaacgtggtggcaatgattcgtgagggcggcgtttcttattattgtaatttggcatcgccgcatgtcatggatcaagaggcgcttaagtatatcgattatgatttagatgtgaaggttttccccaatggcgaaaaacggcttctagatgtcgatgaatatgaagcgcacagtgcgcaatggcattattccgccgaaactgatcggattttaaaagccaacgttaaggttttggttgattggatcaacaatggcaaagggcccttttcgaaggaatacattgatatttggtataaccggtatcaagaattggcgcaccgtcgttagaacactatttagtctcaagcaaaaaagccccagtcattgattgactggggcttttttgtatgggttaatcgttttcgactgaagtatcttgttgaatcgttaatgttttaaagccgatgccagcaccgatgctgatggatagcaaaagcgcgaagacgcaccagccgagtaaactaccagcaatgatgttgagtggcaagaagtggcgtaacagataggttgcaaggcagaaaagaatgccatcaaaaatgaagttagcaatcttaataccaagtgaacgttctactaggaagaaacttgttaccattttaagtgtttggttaggggctaagtcagccataatcgtcaacggtcgttcgattggaactttaataaataacattagggtgctgctgattagagcactgaacaaggtgcgatcccaagtggcactgtgaatcacaagactgtcgtaagccgttgcggcaatcgtaatgacgagtagataagggataatgaagaaaaataagtggacaagaagtgatttttgcttaggcatggtaacgtcctttctgttattaagctgtgttcattataagtcatttagtggtgaaatgacaattagtcagttaattttttaaccatttcttgatgcataatcccggcatctaggaactgtggtttggcggttgcttgaaaattaagctgcgtatagaacggtactgcacttaattgagcatttaaagtgagcgttgctttgcctgattcccgagcaaaaacttcagcggcacgcatcagttcttgaccataaccatgatgccgtgctgaacggctaactgcgacacgttgaacatgataatctgagtccgcttcgatgagccgcaacgtcacaacggcttgatcagcaacgtagccgacaaaataaatcgcttggtcttcgaattcatcaatctcaagttcaggaggcacgtgttgttcaacaatgaatacggcttgccgaattgccaaactatcttgataaaccgtactttttaaatcacgagtttgtttcactaacattaaaaaaccacctcttcaaaaggaataatcaatgtgtatcactataaaatttggtacaataacaataatcgttacactatgatagcataaaatgcgttttgtgtgacataggcacactggggggatactgcatgtttgatcgtttacgccaatcaaaactattattttggtcaattgagcttttgattttggctgtgttaatctttgtttgcaccaaaattagtttcttatttgatccaattggcacctttatttcaactttatttgggccaattattggcgcgggactattattttacctgtttaacccgctaatcaatctgttaggtaaactcaaaatatcacgcaactgggcgattacgattatcttcatcgtcttttttggcggtttaattttcattgtagccactgtgattcctaacttgattaaacaaatcacacagcttgtgacgaacctaccagattttgctcatcgactgcaaaaagtagcggatgatttatctagcaatccgcgtttgaaaaacattgacttcaataaatacgtcaatcagttagatttaaaaccatcgaagattgctgaaaaagttatgaagagtttcacatctagttttggtagtatgattggtgcgattacgagcgttacagttagtgtcttcacgattccaattatgttgttctatatgttaaaagacggacaccgtttagtgcctaatattcaaaagatgttacctgatcgttataacgaccaagtggcggacttgcttcggaaaatgggggcgacgatttcagcttatatcggtggtcaagctctagagtgtttattcgttggcgtctttacatttatcggttatctcattatcgggatgccatacgcttatttgttaggatttattgctggcgtttctaacgtaattccatacttagggccttatattgggattgcgcccgcgttgattatcagtttatcaatttcgattcccaaaacaatcatggtgattgttgtcgtcattgttgttcaacaaatcgatgggaacttgatttatcctaacgtgattggccgttcattagatattcatccgctaaccatcatcattatcttattggtcgctgggaatatttatgggattttaggcatgattttagcgattccgttttatgctgttaccaagacagtgattacttatttatatgatattcaagcgttacggactaaagctaaaaaagggaccgacctttaaaagatgcaggttgaatttccatttttgactatgctatactgcaaggtaggccatattcggctaaatgtacttatttagataatgaaaggtagtggatgtgacgatgaatcctgaccctggaagttcggtgtggggacagttactgttgatattaattttgaccttagtgaatgctttttttgctgcggcagaaattgcacttgtgtcactaagtcgtgtgaagatggaggagcaagccaataaaggtgacaagaaggcgcgagtattagttcaagtcttaggtcattccaatcagtttttagcaacaattcaagttgcgattacgtttgcgggcttcttatcttcagcgagtgctgccacaaccattgcgggtagattagcaccccttttaggaaatgcggcttggacaaaggaagcggccgtattaattgtgacgattgtcttatcctatgtatccctagtttttggggaattatatcctaagcaagttgcactgcatcgtgcagaagcaattgctaaaataacggtgcaacccgtgcggatcgtcggcatcttactgcgaccattcgtgtggttgctatcaatgtcgacctcgctcttaatgaagttgacaccaattgatttttcagaaacagaaccgaagctcacccgagaagaaatggtccacatgattgaatctgggaagagtgccggtgttctggaaaccgatgaatacgaaatgttagaggggattattaccctcaataagaagatggcgcgcgaagtcatggtaccgcgaactgatgcatttatgattgatatttgtgcagacaacgatcaaaacatcgatgccatcttagcccaaccattctcccgcattccggtttatcgggatgataaggatcaagtggtgggggtcgtgcatatcaagaatctcttgaaagaagcacgccaaaaaggttttcaggctatgcaaatcgaagcggtaatgaaagaacctctttttgttcccgaaacgattacaattgatgatttattatttgaaatgaaacgcacacagcaacaaatggcaattctgttggatgaatacggtggcgttgttggcttagccacgattgaagatttattggaagaaattgttggtgaaatcgatgatgaatctgataaagctgaagaattgtaccaaaaaattgatgcgcagcattacaccgttatgggaagtatgccaatcaatgaatttaacagtgccttcaatacagatattcaagtcactgatgtggatacaattgccgggttcgtgattactgaaattggtgccattccagtcagtggtcatccggaaacaattgagctgccaggtggcatgagattaacgacggggtcggtttccggttcacggttgattgatttacaattaacgttaccagaaccagagaccgatgcaccagaagaagtcgactaaattaaatgagcacaatcaatgggacaaagggtgacgcaatggttgcgcaattctttgtcccaagcgcattatattggaataacggaaaggattttataatgacacctactgaattaaaaacggcggttgatcgtcgtcgtacttttgcaattatttctcatccggatgctggtaaaacaacgattacggaacaactcttacttttcgggggcgtgattcgtcaagccggaacagttaaagggaaaaagagtggccaatttgccaagtccgattggatggaaattgaaaagcaacgtgggatttccgttaccagttctgtgatgcaatttgattatgacgacaagcggattaatattttggatacaccgggacatgaagatttctcagaagatacgtatcggactttgatggctgttgatgcggcggtcatggtcattgattctgctaaagggattgaaccacagaccaagaaattattcaaagtctgcaaaatgcgggggattccgattttcaccttcatgaataagttggatcgcgatggtcgtgaaccacttgatttgattgctgaattggaagaactattggacatcgaaggctgtgctatgaactggccaatcgggatgggaaaagacctccgtggcctttatgatatcgccaaccgtcgaatcgaactttatcgaccagaagacgaagccaacccttatttggcccttgatgaagcaggtcggattgccggtgataatccattgaaagaagattctgtttacacacaagcccttgatgatatcgaattgatcggtgaagcaggcaatgcctatgatgctgataagattgcaacgggtgaacaaacaccaatcttctttggctctgctttgactaactttggggttaagacgttcttagaatcattcgttaacttagcgcctgccccagaagcacacaaaacacaagaagaaacgttggttgaaccaacctctcctgatttctcagggttcatcttcaagattcaagccaatatgaatccagctcatcgtgaccggattgcgttcgtacgaatttgttcgggtgaattccaacgcggaattgatgtcacattgacgcgaacaggcaagaagatgcggttgaacaattcaactgaattcatggccgacacacgggaacaagtgacaagcgctgttgctggcgatattgttggattatatgataccgggaatttccaaattggggatacgattcacacgggtaaagaggctgtttcatttgagaaactccctcaatttacccctgaattattcatgcgcgtcactgccaagaacgtgatgaaacaaaagtccttccataaagggattcaacagttggttcaagaaggggcgattcagttgtataagacttacacaactggcgattatatcttaggcgccgttggtcaattacaatttgaagtgttccaatatcggatgcaacacgaatataattctgaagtattgatggatccaatcggttcaagaactgcgcggtggatcaatccagaacaattggatgaacggatgtcatcctcacgaaatctattggtaaaagatattcatgacgaaccattgttcttatttgaaaatcaatttgcagaacgttggttccaagataagtatccagacgttgaattaaccgcaaaactataatataaagagtcaaacaaaaataagccgccgattcagacacactaactgttgtctgaatcggcggcttattttttttaggggggtatttagtcaaaagttaggaggccttccattaaccattgacctgttttaagttgacaccagcgactttgattatcgagtacaacgacttgcttaacgactacccgtgttttaggcactatctgatatgttgtgggttggtcatacggtgcttgccaaaatgttacggtattgttgttcagacttgcactgaggtttagaggggttgtttcgataactgcgtaatggtaggtgaactttggtacttggtatgattcatcactgcctttaggattagtggcatgtaattgataacgcgtaggggtaatccaagaactgccaagattgaaccattgtttgccagatggagcagttgcacagctataaatcttccaaaccgcgtgctttggcaagcgagcagcagtcagcgcttcttcacttggttgctgataggtatccgttggctcaagaagttcgatgaagggctgttcaggtgcatcgctgtgttttaaattcagcggatcatatttaaaatggacaaactgtgtcttagttgtaaagcgaccagtctgattagctgaggtgtggtgcacgaagttagcaccaccttctagtggattggcttgatagtgttcgttcaaagcacctgataaaaattggggcttaatcaacaagccaccttctaaattctggtgtaacaccattactggtgctgcgagttgcggtttataaaaaagccagatagtggtgttttcttcaggaaactgttgttttaaattggtaatagctgccaagtaataaccggcaaattttagccatggcaaattgagcacggtacccacttcacctgtcagggtcatcgttggtcgtaaagggacccgatgatgatcgaggtagtgaatggtaactgtgctatggcgcggttgtgtggacatcgtagccagcagtggcgttgcgtcctgactaacgggaacgaccggctgtttctgtgacgattgaggcgcttgacggatgggctcttgctcagagacagtttggcgtacatgactgttcggtagaggagctgcttttttcgggcgccatttcaataacgattgaagcaggttaatcagattcatacggactccttgtagcgcattacttattactactagtctatcataaattacaaaaagtgtggttgataattaacgcgtcaagtgggcataaaaaagaacccctgcaaaaatagcagtgattctaatcgtttaaatatctaatacttgtaatttagttgcagtatgggtgacgcggccgatggaaacgggaattaaggaaacgattaattctcctgtacgtgaaatgacggcgcgttctagatgcccaccaaaaacgcttgtatctaaacgggcaaagcttgcatgtagatggacatcaatcgtgccatttgcattttcgacattcccactaagggccagcagttctacttgctcttgactggaagtggcaatatattgatccgtttctggtgaataaacgctgacggtaacttcatcacaggcaccaatccccgtgatagttcccagttggttggggaaggttgcggccaaatatttaagttctgttaggatttcgtcgcccacttctaaccggcaaataatttggtgctctttttgaaaagtcttcatcgcgtcattaatcctcctaaattaggttgaaagttattatacggtacgacctattcaattgccattattttgcctatgtaaaaaaccgccccaacaaaatgaaatgtcggggcggttcgaatgattaactcactgtttttgaaggtgttggaattgtaatttcgactaatggaccatcattcaagacttcaaggccatctgtggaatctaaaccggcgagttccttcaatacaaaatcgatctcggcttgttggacatgtcgatgatcattttttaaaaggagctcacgttccttcgatgaacgcgagtcaagaaccgttgttttaccaagtgaataaaccttaacgtaggttgcggctgttgcagcgagttgttgtgaaacaagtcgcttataagaattggttacattgattaagcgcatctaaatcactccctggatgtttaagtcttaccactagtataactgaaaacgcttcatttggcacgtaattcgttttaacttgagataataaagccttttaatctgtgacctgtgaatctttagcatcggtgatttgaatctgatcttccaccaaccgagccgtcaattgtttatgttctgggtgatcgagataatagtcagccacgcgatcttcaatttgttcttgaataacacgtcgtaatggacgcgcacccatctctggattgtaaccaagatcgacaagccgtgatttgactggttcagttacggcaatgtttaacccttggtcagcaatcatcgcatttgtttgatcgagcatcagactgacaatcttcaagagattttctttgcttaatggttggaactcgatgatatcatcaaaccggtttaaaaattcaggtttaaagtagttttgtagttggtttaaaatcgagtgtgtctgaccagaaagggttgccccgaaaccaacattggcttcggcatcagtttggccggcatttgaagtcatgatgatgatggtgtctttgaagctgaccgtccgtccttgtgaatccgtcagacgaccatcgtctaagatttgtaggaacatatgcatgacgtctggatgtgctttttcaacttcatccagtaagatcaagctgtatgggttgcgccgaacttgttcggttaattgacccgcttcttcatagccaacatagccaggaggtgatccaatcaattttgacacactgaatttctccatatattcgctcatatcaaaacgaatcatagcatctgtgctaccgaaaagttctttggcgatttgttttgctaattcagttttcccgaccccggttggtccaacgaataggaaagaaccgattggtcgaccggatttgttgaaaccaattcggttgcgacgaatggaacgggcaaccttatcgactgctgaatcttgaccaattacgtgcgcttcaagattttcagcaaggttcttcaactgtgcttgttcttgtgcctttaactcaccaactggaatgtgggttttttcttcaacgattttttccatatctttgtcggtgacggttggcatttcagattggtcaatggcacttgtttcgcgcatcttggtcaattttgtgacttgatcgcggtaataagcggccttttcgtaatcctcgtcctttaacgcactttgcttttcagcttccgcattttgtaatttcttttcgatttcttttggatcgacaacggtaatcgtcaagttcttcttagagccggtttcatcaagtaagtcgatggccttatctggtaagaaacgatcctggatataacgattagaaagggttgcagccgccttaagtgcctcgtctgtgtagtggacttggtgataggcttcgtatttatcttggagtccttttagaatttggactgtttcgtcaacagaaggttcattgactgaaacgggttggagacgacgggcgagggccgcgtctttttcaatttgtcggaattcattattcgttgtggcccctactagttggagttcaccacgggcgagggcgggttttaacacgttaccggcgtccatgccaccttcggcattaccggcgcccacaatttcatgaatttcatcaatgaagagaatgtattgcttattctgcttcaattcagtcatcagttgttgcatccgttgttcgaattgaccacgaataccggtcccttgaacaagtgaaacaacatctaagcgaatgacttgtttatccttaagtttggcaggaacgtcatcgtcggcaattttttgagctaagccttcgacaacggcggttttaccgaccccagcttcaccgattaatacgggattgttttttgttcgacggtttagaatttcaataacacgatcgatttcagcatcgcgaccgatcactggatcaatttggccagctttagctaagttggttaggtttacaccgtattgactgagcagactttcgccgttttgcccgttgttgccgccaccttggccgccactttgggtttgtggcccttggtttgcttgtaattgatcatcgggagttgcgcccattgctcggaagaaactattcaggcttccaaagccaaatggatctgcatattgcccttgtggtgcttggccattactgttttgttgtttcaagagttggtaacagttttgacaaagatcgatttcttgtcgttgaccattggtgcttgtatagagatgaatcgttgcaggattcttctggcagttttgacaaagcattaatctgtcacaacctttcattaataatagaatcgtcaaagtgttcttgactatctttgacctttatccaaattataatcatctctaaaaaaagttgcaagtcaggcaactcgaaaataaaagtttcttgtcaggtatgggcggtatgcggtagtatgaggtcatcgttttatttcgcagatggaatgaaaacgaatttttcaagccacgataaaagaattgcaaaggaggcagaatggcagatgcgtgattttttagcagagatggatgccttaataaataacgaacaaactgagattgaggttgctcagtccgaatttttagattttcagaaagtatgggtcaactatgaccatcgaaaagaaattgtgggcgaagcacaacgaaatggtgcggtaatctaccgcaagtctgaaagcggtatagtgtagacggctactaattttgttagcgaaactattgtagtattttaaaaaaaatggtaatcttaaatatcggaagggtagccactactagtgaccactcatttcgttaaaaactaaatctataattagataaaaggggatcgattaatatggaaaaacgcgattttcacgtagtagcagacacaggtatccacgcacgtccagctacattattagtacaaacagcaagcaaatttaactcagatgttaacttagaatacaaaggtaaatctgtaaacttgaagtcaatcatgggtgttatgtcactcggtgttggccaaggtgctgacgttactatctcagctgaaggtgctgacgaagcagacgcaatcaacgcaattgaagaaacaatgaaaaaggaaggtttatctgaataatgacaaaactaagagggattgctgccagtgatggtatcgctacggcgaaagcctatatgttagtgcaacccgatttgtcattttcgaaatcaactatttcagattcagaaaaagagattaatcgtttgcataatgccttacaagcttccacgagtgatctagagaccattcggaagattgctgctggatcattaggggaagaagaagcacaagtttttgatgcccacatgatgattttagcagacccagaatttaccggcgctatcgaaggtaaaatcaatgatgacaaggttaatgctgagcaagcgctcaaagagatcgcggatttattcgtggccacttttgaggctatgactgataacgcatacatgcaagaacgcgctgctgacatcaaggatgttactaagcgagttctcagtcatttattaggggtaacactccctaacccagcgttaattgatgaagaagtaattgtgattgctcatgacttgacaccaagtgacacagcccaattaaacggtaaattcgttaaggcttttgtgactgatattggtggtcggacttctcactctgctattatggctcgttctttagaaattcctgcaattgttgggactgaaaatatcacaacttctgttaaagccggcgaacaattaattgtcgacgggattaacggggatgttattatcaatcctacagatgcagacattgctgaatacgataagaaggcgcaagctttcgctgatcaaaaagcagaatgggaaaagttaaagaatgaaaaatccgttacaaaagacggaaaaacattcacagttgctgcaaatatcgggacacctaaagatttagatggtgttatcgataacggtgctgaagcaatcggcttataccggacagaattcttatacatggactcatctgaattacctagtgaagatgatcagttcgaagcttataagactgttttggaaggtatggctggtaaaccagttgttgtgcggacaatggacattggtggggataagaaattaccttacttgccattacccgaagaaatgaatccattcttaggctaccgtgctgtgcggattagtttagatcgtgatgatattttcagaacacaattgcgtgctttactccgtgcttcaaactacggtaagttacgtatcatgttcccaatgatcgcaactgtcgcagaattccgtcaagcaaaaggcattcttgaagaagaaaaagctaaattaattgctgatggtcaaactgtttctgatgatttacaagttgggatgatggttgaaattccagccagcgccgtcttggcaaatcaattcgctaaggaagttgacttctttagtatcggaacaaacgacttgattcaatacacaatggctgctgatcggatgaatgaacgtgtatcatacctttatcaaccatacaatccagcaatcttacgtttaattaagaacgttattgacgcttctcataaagaaggtaagtggactggaatgtgtggggaagccgctggcgattcagtcatggcaccactccttgttggaatgggcttagatgaattttcaatgagcgcaacttcggtccttcgggttcggagcttgatgaaacgtttagatacaactcaattaactgatttagttgaaaccgctgttaatgtgaatataagtaatgaagaaaaccaaaaattagttgaagattttatgcaaaatctttaattaaatggtaaaagatcgcccactgtggcggtctttttttgtgcgtaaaatttggatgagcaaaaaagattgacagttatcgattacaaatgtaaactgtaactaatgattacaaatgtaaacgaagggagaaaaccgcgaatgactgaaaaaataggggttattacggatgcggaatgggaaattatgcggatggtttggtcacttgggcaagtcaacagcagtcatttaattgaactcgttcagcaaaagcgcgattggcaagcgtcgactgttaagactttgctaggtcggttggtaaaaaaagactatctaattgccactaaagaaggacgccgatttatatatacggccaatatcgcagaagatgaagcgatgaaccatgccacgcagtcgctgtttaaccaattatgtgggatgaaaaaaggctgcacattagccactttaattgagcaaacaacgctcagtcaaaatgatattcagacgttacaaacggtgttagcggctaaattacctagtgcaccaacaatgattgaatgtgattgtttaccagccaattgtgattgcatagaggaggaagtaaaatgaaacacgatgaaatgcaccatgaacatgaaggacacgatatgaaagagatgcatcacgagcaccaaatggatcacagcatgcacgacatgcatcatgaccatgagatgatggatcatgatatggggcatatgaatcacgatatgcatgggatgcaccatgacatgggcgacggcgatatgatgatgcatggtggtcatatgatgcacatgggaaatctaaaacaaaaattctggatttcattaattgcaacggtaccaattctaattctctcaccatttatgggcatgcagttaccttttcaaacgactttcccaggttcagattggctagtattgattttagcaacatttctcttcttttacggtggggcaccgtttttaaagggcgctcaaggagaattatctgctaagagcccagcgatgatgaccttaattgcaatggggatcagtgtttcttatctatatagtttatacgcctttgttgcgaaccatttcttgaacccacaaggccacgtgatggactttttctgggagcttgcaacgttaatcgttattatgttgttgggacactggattgaaatgaatgcggtaatgagtgcagggagtgctttagaaaaaatggctgctttgttacccggccaagcacaagtaattgatcaagcagggcatcaacacgcggttgatttaaaggacttgaaaaaaggacaaactgtattagtcgcagctggtgaaaaagtacccgcggatgggttaattatcgccggtcaaagccaagtcaatgaatccttagtgacaggtgaatcaaaggctgttgcgaaggctgaaggcgatcaagtaatcggtgggacagtcaacggaaatgggacgttaaccgtgcaagtgaccgggactggcgaaagtggttacttagcgcaagtcatgaaattaattaaacaagcacaacaagaaaaatcaaaagttgaagggttagcagataaagttgcgaagtatcttttctatgctgcattggttgctgggattatcgccttcattagttgggtgttcttggccgatctgaatacggcttttgaacggatggtaaccgtctttattattgcttgtccgcatgcacttggattggccattccattggtggttgccagaagtacagcgattgcggctacaaacggcttgctcattcgtaaccgtgaagcaatcgaattgtcagataaggttaccgttgttttgatggataagacggggactttgacacaaggcgcattcaaagtgaatgctgtcgaagttttcgatacagcacttgatgaacaacgactcatgcaactctttggtgcgttagaacgccattcaagtcatccattggccactgggattctagagtataaccaagcacaaactattcctgatttacaggcagacaatgttcaaacgattcaaggcgtcggtttgtctggaacggttgcagggcaaagttatcaaatagtgacggcaacttatttacaagcccagcatattaaatttgatcaagctcttttccaaactttagcagaaaaagggaattccatcagttatctattacaagatcaaacggttttaggactagtcgcacaaggtgatcagattaaaccagaagcgccagctttcatccaagcattaaagaaacggcatatccaaccggtcatgttaaccggtgataatcaacaagttgccgaaaaagtggctgcacaattgggcggtatgacggttcaagcgaacttgaaaccagaagataaagaagcaatcgtcaaagattaccaagctaaaggcgaagtcgtcctgatggttggggatggtgttaatgatgcaccaggtttaacgcgggctgatatcggaatcgcaattggtgctgggacggatgttgcaatcgattcagcagatgtgatcctcgtgaagagtaatccaaacgatattatgcatttcttgaatttatcgcacgcaactaaccgcaaaatgacgcaaaatctctggtggggcgctggttataatattttagcgattccattagctggggggctatttgccggaattgggttagtattaagtccagcagttggtgcaatcttaatgtcactctcaacaattgttgtggctattaatgcaatgactttgaaattaaaacgagatgcatgatgtcaatctttttttaagcagtatgaagtagatttcgataaggacgggcgaaagaaaatatcgcacacaattagacgcacacaacatatagttgtagtgcgtctttttgttggtttatctactatatataggttgaatccgaatttttaatccgctatgatggggttactgattcaaaaggagactggtgctaagatggatatgaaaattgcttcagaagcagacttgcaaattaaagtgattaaaagagatgggcgaatcatgcctttttctgcggataaaatcgaacaagcaattattaaagccgctaaaaatgtgaagacggaattagagccattagactatcaagtgttaaacacagtcgcactagatgttgtgagtgaagtcggcagccgatttgataaagatgttaaaatctatgaactgcaaaatattgtggaacataaacttttagaacatcaccaatatgatattgcccaagaatacattaactaccggacgcaacgggactttgcccggaataaggcaactgatatcaactttaccattcaaaaattattgaaaaaagaccaaactgtggtcaatgaaaatgcgaataaagatagtcatgtttttaatacacagcgggacctaacggcagggacagttgctaaagcgatggggcttaagatgttgcctgataaagtggcgaacgcccatttaaaaggcgagattcattggcacgatttggattaccaaccatatagtccaatgaccaattgttgtttaatcgattttaaagaaatgttgaatcatggctttaagattgggaatgccgaagttgaagcgccacattcgattcaaactgctacggcacaaatgtcacaaattattgctaacgttgcttctagtcaatatggtggttgttccgctgatcgggtggatgaattattggcaccatttgccgaaaagaattatgccaaacatttagcagatgccaagaattggattgatggcgaagcaaaacaaaaggattatgcgcaaaccaagactgaaaaagatatttatgacgccatgcaagcgttggaatatgaaatcaatactttatattcatcccaaggccaaacaccatttacaacgcttggttttggattaggcagtaactggattgaacgtgcgattcaaaaagcaattctttcaattcgaattgaaggattaggtaaagaaaaacggactgccatcttccctaaattagtttttgcagtaaaacgcggcttaaacttaaatccaactgatccaaattatgacatcaaacaattagctgttgaatgtgccacaaaacggatgtatcccgatgttttaatgtatgacaagttggtggaattaacgggttctttcaaagcaccaatgggttgtcgaagcttcttacaaggctggaaaaacgaacatggtgaagaagtgaatagtggccggatgaatctcggcgtggtgacaatcaatttaccacggattgcacttgaagctgatggcaaccaagctaagttctgggaaattctagaacaacggttgcaagtctgcaaggaagccctggtctttaaagtggaacgcgctaaagaagcgaagccagaaaatgcgccgattctttatgaatatggtgcctttggcaagcgtttgaagaaaaccgatagtgttgatgaagtctttaaaaattcacgcgcaactgtttcattgggctatattggcctttatgaagtcggtacagccttctttgggccagactgggaaaaggatgccaaggcaaaagcctttacggtagacgtcgttaaagacctctataatcactgcgttgattgggaaaaggaatacggctatcacttctctgtttacagcacaccagcagaaagtttaacaaatacgttctgtcaaaaagatacgcaaaaatttggcattgtcgaaaatattacagacaaagaatactacacaaatagtttccactacgatgtgcgtaaggcaccaaccccatttgaaaaattagattttgaaaaagattatccaaaatactgttctggtgggttcattcattactgtgaatacccaaatctgcgtcaaaatccaaaggctttagaagctgtctgggattatgcttacgatcgtgtcggctacttaggcacgaatacgccaattgatcaatgcttcaaatgtgggtttaaaggggactttaagccgacagaacgcgggttccaatgcccacaatgtgggaacacggatgctgctacatgtgacgtcgttaagcggacttgtggttatctaggtaatccacaacaacgtccaatggtgcatggtcggcataaggaaatcgccagtcgagttaagcacatgcatattaccattggcaacgataataacaacgttgcacggcagtaattgtgaatacgggatttgaaggagtttttgaagatggcagtaaaacaacaaggcccgaagaatccggcgcccaaagaatggctttctgaaacactaagccaggattatattgcagattataaaccgtttaactttgttgatggcgaaggggtgcgctgtagcctatatgtgagtggttgcatgtttgcttgccccggttgttacaatcgagtggcgcagaattttcgctatggccgcccttatacaactgaattagaagaccaaattattgctgatttagggcaatcttatgtccaaggactgacgttattaggtggcgaaccgttcttgaataccaagacttgtttatcgctagtagaccgaattcgcgccacttatgggcagacaaaggacgtctggtcatggacgggatatacgtgggaagaactgatgcaagaatcagatgataaactcgagttgctgtctaagattgatatcttagttgatgggcgcttcatgaaggaccaaatggatctgacattgcagttcagagggagtgccaatcaacggattatcgatgtcaaaaaatcattagccgctaaaaagcccgttatatgggcaaagcttgttcattgaaagtaatatgtaaaataaagttattaaaaatttaatttttattttccgtcattggtatatacctaacacggataaaaaagagcgtcaatccatgattagaatgggttggcgctttttttagtttttgtgaaaaactggacattcataggtaatgaacggggttatcgtttgacaacgctttctgtaacataatacttgtaatagcaattattttttaattatgattcaggaaaaggagtgaggttaatggattcatttatcagtttcatggagaaacgctttttaccagttgcggcaaaagttgggaatcaacgacatttgccattcgtgacgccttcgtaacaacgatgccattgatgatcttgggtgcttttgcaaccttgattaacaatttaccaattccggcatataccaatttcatgaacagtgtgttctcaaagacagttggtaagggcgctgaaaaggcttatatctggactaaattcgggggcaatgcttggagcgggacatttgcgattctttctgtgtttatcgtcttcctagttgcttacaatttaggtaagtcatataatatcaatccactagcagccggcgtaacagcattagggtcattctttgctgttggcggtcttgcagggatggactcaatgggcttgttcgttgctttaatcgttgcgatgatttcaacagaaattctcagacgtttattgggtaataaacacttagtcattaagatgcctgatggggtaccacctgcaattacagctaacttaaatgcgattaaagctggtaaagcagcaccatatattgttaacaaaccattctttgattcatttgttaacttaggtgggactggtgctactttaggcttaatcattgcaatctggttagtgggtcgaaagaataaacaatattcaatcgttgggaatttgagtgccgctcctggggtcttcaatattaacgaaccattaacatttggcttgcaatcgtattgaacccaattttattcatcccatatattgccacaccaatggtgatcgttacaattgcatactttgcaactagcaccgggttagtgcccgctgcaacggttatgccaccttgggtaacaccaccaattatcggtggggtcatcgcaacggttagttggcaaggtggggtattagcagcagtgaacttacttgtttcagtgctcatttacctaccattcatcaagatcgccacagacatggctttaaaagaagaagcagcccgcgatcaagcggcttaagcacaaaaaaaggtccgacatgaatgtcggaccttttttttgtgcctataattaatgagttgactcacttgcaatggtgacgtgcccgttttgaacgttaccaatgacgatattgttcgaaatctggccagcggttgcatcggttagatagttgatactatcactcatcccgacaacagcgggacctgctttgaccgtaatggttgaagctgattcaccaggcttttgttgatcaagttgctcaaaaatggtttgatcagtctgtgataaatcggcagcagctactagtgagtccgtcttttgatagcttgttgcttgaccagcaccgatgcgtagcagttcatgatcattcatgaagaggtagagataaccgatactatcaccactagcaatcgacttaggggttaattgataaccagcttgtgctgcatcccttttttgagcagcatagattgtattttgattgagcgttactaaagtgtatttggcaagatcttgaatggcagagcgttcaatactattataacgtttttggtacatgaagccatctttgaccatcagttttccggtgtcattagcactcgtcgttgttgcggccgcaatccaagtgccattgagttggtcgagggcaacaggactggctgttgttttggcggttgctttttgactgacgaataactgtccgcggtcaaaattggtgggggtttgtagatctctgtaatgagctgtaattgcgtataggcgatttcctttggcaacgaatccctggtcaattgtatttttcccagtcttagtctcaagaaagacgagatctgagaggtgtttaatcttaaagtcagcccccaatttgtgtaatgcagcgttgacttgtgccacagtcatcagatggagtgtcttttgatagctcttcatcagatgactgcggctatcttgttgccattttttaaacgaaatttgttgataattaatcggctgacttgtgaaggtgcctttagaggtcagccaacttttaggagtggtcatttgagcaatatttgaaacagtgatgtcatcagaaagaccgtttttagtttgcttagaaaggagttgtttgttaaacaaccaagtctgtgaatcggccgcgagggcttttttagttgttgtccggttggcgtaggtcgtcatagttggctgcgcgcgggatgtggttgatgaagccggttttttagcttggcaacctgctaggagtgttattgttaaaagggtagtgattaaaagtgttttacgcattttgaagctccgtttcatttgtctgcaggatgggttttgccgaataagccgtcatcgtcatccgtgttgtagtaacttaaaaaaggaaagagtagtttaaaagtggaaccactgccttgttgggagctaacggtgagttcgtgaccgagcttttcacttaaggcacgtgcaaggtagagccctaaaccggttgaacgttggttagaatagcgcccattttgaccggtgaaccctttatcaaaaatccggggtaggtcttcagccggaatcccaatccctgtatcgatgacacttaaccaaacgccttgttcgtcacgttcaatctgaaccgtaatttgtgcgccatctggggtatattttaacgcattggaaatgatttgattcaaaataaaagccagccatttagcatcggttaagacggtttgatcggcaccaagcagtttaaattggatgtgtttttgaataaaataattgcgattttggcggatgatttggttgactaaaggtttcaaatcgtattcctgcaccaagtaatccttagaaaaactatcgagacgcgagtagtagagcacttgttcaacgtagtgttcaatttggatcagttcatcggttaattgattgaatttgtcttctggaatctggtcttcgatggattcaatgagcaattgagtagctgctagggggaccttactttcgtgcacccagccatcaatgaaattcttttgatcttgttgcgctgagattagtcggtcaatgctttgttgatgataggctagcagttgattcacgtagtgttgaatgaattgtttttcagccgaggtagcgcctgtaagtggccagttgaggctatcttctttagcatctaagcgtgtttggattgtgcggtaccacttgagatggtagacgtataagccaaccaaaaaggcgcagaaaaaaagcgccagcaataaatcgaggtataaaagtgtcgccttagcaaagcgcatactagggtcgagccataggacgatatccagaacaatcataccgctgaagaaaaaagcgatatgaaataaatgatcacgtaagaattttttaaacgtcataataactccttaggggatgatatagccttggccaattttcgtctgaatgtagtcttctaaaccagcactttcaatttttttgcgaagccgattgatgttaacggttagtgtgttgtcgtcgacaaaccgttcatcgtcccagagggcacgcaataacttttcgcgactgacaatctggccgtgttgacgcatcagaaattggaggagcttatattcgtttttggaaagatcaatggtagtctcacccacctgagctccgccgctttggaggttaatcattaggccgttatgttcgatgatatcggcattttggtcgacgtagttgtaagtccgtcgtaagagggcgttaattttggcaattaaaacttccatcgaaaaaggtttattgacgaagtcatcgccgcccatgttcatcgacatcaccatgtccatgttggtactgcgactagaaatgaaaattatggggactttagatacttcacgaattttgcgacaccagtagaacccgtcataaacgggcaggttgatatcgagtaaaatcagatggggtttattggttaaaaattggtcgaaaatggtatcgaaatcggtcgtaatatttgcgtgtaattgccacttatttaagttctcagcgattaagttggcaatcgttggatcgtcttcaacaatcataatttcaaacataatgaattctcctcatacatagatagactaatattaaccactttcactagaaaagacaaccaactaaggtcgtagttataaaatgggcttttgcggtcaactctgctaaaatgaataccaattagttaagggatgtgaaaaaatggcagtcgtatcagtccaacaagtttcgaaagtctacgggcatcggtttagtctggtcaatgcgcttaataatatttcatttgatattgaaccgtgggagtttgtcggtattatgggcccttcaggcgctgggaaaacgaccttattaaatatgattgcgaccattgatcggccgacgcatggtcaagtgttaattaaagatcaagttgtgagtcggatgcgggaagctaagcttgctaattttaggcggcaagatttgggctttatttttcaagattttaacttactagattcactgacggttcgcgaaaacatgttactgccattagcgcttgataagttaagtgtgccagtgattgaaaaacggttggataaagttagccgagtcttgggcattagtagtttgttggatcgttatccggatgaagtttcaattggacagcgccaacgagtggcatgtgggcgcgcaatgattaccaatcccactttgttattggccgacgaaccaactggaagtttagattcaaaatcagctacggagcttttacaatatttaaccgtgattaatcgtcaggaaaagacgacaattttattggtcacgcatgatgcctttacagctagttactgtcggcgaattcttttcattaaagatggtcaattattctcggaaatcgttcgcaatggtgatcggcaacaattcttcaatcaaattattgatatgcaagcaaccataggtggaggaggccgtttcaatgctgttacacctaaccgttagaaatgcgattaatcatgcgcgcgactatgcggcttatgtgattgcctgtgttgccgcgattgtggtttatttctgctttacgtcgattcaaactgcgccaatctttaggcacctcaagatggctggtgaatctttagcttttggccggatgatccaagtagcaggtttaattattttgctgtttgccgcttttttcttggcatatgctaatttatttttcattaaaaggcgtcggcgggagattggtgttttaagtgtcatcggggtgactaaatttcagattagcttactcttcttctttgaaagtttgattatcggtgtgattgccctgattatcgggttgttattcgggattcttttttcgaaattattcgcgatgttattattacgcatgatggggattgcggttgccatgccgtttttaatatcatggcgggccattgaacaaacgacattcacctttggcgggttgttcctattaactggttttttaaacagtacgatgatttatcggtatcaattagtgacattgctgcaaccatctgcagtcagtcggaaagtgcgccgaccgaactggctgacttatttatgggggattattgcacctgtattgattatcagcggctattatttggcagaccaaacactggttttgatgccgagcttagagcggcgctatggttttgggattgatttggtttatttactaaccattttattacttgaaatttttggcacactggctttttttcaggcctatacgcaaatttggctacagttagaacggcactggaaacggctttattatcgtgggacacatttgttaaacgttacgaatttgagttttcgttttaaaaagaatgcaaagatgttgtggatgattacgattttaagtgcagtcactattaccgcaatcggaagtgcggcgatgatttatacgcacggtcaagatacattacggcagaacattccggtggatttggtttatacacaaagtcaaaaagcagcggtcgacaaaattttaacgcaatatcatgttcagccggttagtcaaacaatgtcttcgtttaaattggtggatgctcgatttaaggtcaattcaccgttaaatcgggaaggcatcaaaatggatggagcagctgttgtcatgccgttatcccaatacaaccaagtaatggcgcaacaatttaagttaccagcaactaaattgaagaaaaatactgtggtgaccatcattaacttgccattaacaatgctgaagatgcctcgcagagcaggtgcaggtttgccaccgaaaagagctggaatcccgttgcaattaaaacagtctgggctttcagattttcggattgtacacattcgtaagctatttccaaacggttctgatgtcttctttgatggtaacttaaacgtgattgtggccaatgatgctgaatatcaacaagtccaagcaacttcagttgatcaaatctatgcagttcagctctccgctgcccaacaaaagcaaaaacgattaatgcgcgatttattccgtctatctcaaaagcccaaacaatgggattatttaatgacgcacaaaaaagccgggcaaacccattatgaaattaaaaccactgatcaacggctagaagagttaagccgctattctgtgcttttaaaaaaacctaaccgagatattgctaacgcaaacttcggattttatatgtatgtcgccatttttattgggttaatcttcatgttagccactggtagtatcatcatgttgaaacaattgtcagaagcacaagaagagattttgcagtataaaacattgaaaaaaattgggatgagtgacggtgagattaagcgcacgatttatttccaaattttgatgctctttttactgccaattattttgggatcgatgcacgccttctttgcaattcggttattgggtttgtttttagataatcctgggttacaattagcctatatcgtttgcggcctgtttatcatcatttactttgttttctatctaattacggccaatatctacaatcgaattgtgaatgcaccgctcaatagtgatgtgttctactaaactcggagggaaagtttttgcaattagctatgtaccgcgcaaaagcgcgtcaattattaaaaggaaactggcagaaaatggccgctttagtcgcgctttggttgttagttgagatagtagtcgactcaatgattgaaggcgtgtttggcgccagttcatttggttatcaaatgctcaacacctttgccaattatttcttatactttatctttttaaatgctgttttcttaggtgtttataaagttagccagaataagcccagctattaccgggataccttattgttattccggcaaccgttgtatacccatcttgtggtattgaatcttgttcaacaagtgttaaactggatcttactattaattgggttggcgccgttttatcggttactcggttgggatcgtgtatttcaattcacttttaatggattagattccgttgcgccttatttgctaaacattagccagcaggggacaatttctgaaactgtcttattgtttgtgacggtgatgttggttttgtcactgttgcaacccgtgattttaacgtattatcagattttagtactgttgaagtttgatttaccacaagcaccactcaaattaatctttagcctttcatgggtgattttaaaagggaactggctgaaattactcgggcttactttatcatttattggatgggaactggtcgtctatatgactgctggactaggtctcttgtggttctatccatacttaattatgagcgttacgattttctatcaagaagttaaagctaagaaagtccaagtcattcaatagcattagggccgccatccatttgggtggcggtctttttttatttagttagtaaatatagtgcgcgcgatacccggaatgcgctactatagaaattagaaaggtggtcatttaaaaatgcaattaacagtcttaggttattacggtggatatccatacgccggtgttgggactagtagttatttattaacaagtggggcgtatcatttattgctagattgtgggagtggcgctttattagcgcttgagaaacaatttgacccattgcaactagatgtggtccttctcacgcactatcatcacgatcacattgctgatgtgggggttttacaatattattggcaactgcatcaaggaaccaaaaaggaacccattttacctatttacgggcatctgcaagatccactccactttggcagtttgacacaaccgggtgtgacgcagggctttggttatcaagaagacacagagctgaccctggggccgttgaaagtaactttcaaacggacagtgcatcctgtcccagcattcgctgttcgaattgaagaacaaacgacggggcaggtcttggtctttactgcagatacggcgtatttcccagaattagctgctttttgtcagtctgcagatttactgatgactgatacgaattttcttgaagatcgcactggtaaaatggcgcatatgacaacaacgcaatccggtaacttggcacaagaaagtggcgcagctaaaattctattaacgcatttaccacaaggggtttcggcagaaacgctacaggcacaagcacaagcgactgttggggacgtacccgtgatagttgcccaacaggatttgacaattgatgtcggagcgtgtaatataggcggcgttgatgaaacttacaaaaaataagtgaattttcattagaaagtagaaactactataattttttttgaatgataaatataaatgtaaaaacataaaaattaatggtgagtgggaaaatttaataataaaccgttttaattagacgttttatgtccaaatgtctatttattaattattaaaaaataattaataaatttaattttagggtagttttctagtgctgactcgcgtataataaaatttgtaagagagaaaatgattgtcttattgttaagtaaggtgtcatgttaataaaggagagagacatatggttacgttatatacatcaccaagttgtacatcttgtcgtaaagcccgggcgtggttagaggaacacaatattccataccaagaacgcaatatcttttcggagcctctcaataaaaatgaaattaaaacaatcttacgcatgaccgaagatggcacggaagaaattatctcaacgcgttctaaggttttccaagaattaaacattaaaattgatgacttatcaatcaacgaattattagatttagttcaaaagaacccagggctattacgtcgtccaattattttggatgaaaaacgacttcaggttggttataacgaagatgaaattcgtcgtttcttaccacgtgaagtacgggcattggaattacaacaagcacaattactagcaggattctagaggagagtcggggctgttaacagcctcgacttttttgatgggttaaaaaattaattgctgcgatgtagatacttgaatgttacgccagatactggtatggtaggtcaaagaaagtgaattacgacgctataagaagcgcgttagaaaggggcgttgtcccatgagaatggaaaaaatcgacgagaacacaattcgggttctattagaaaatgatgatttagaagaacgcgggattactggacttgatttgttgagcaatcataaaaagattgagcggttcttctattcaattctggaagaagtggacagtgaacacacatttgcgaacaacgatgcagtaacgttccaagtgttgcctaacgatcaagggttagaattactgattagtaagaatatgccaaactttgacggtggtaaaggtcaatcagaaatggtgcaaggcaaagacggtattactgaatacattaaagaacaactgttgaaacgagatacggtccaagatgatgcgactgaggaagaggatgaaatgaccgcttatatgaatcaagcggacaatccaatgaaacagattgtgttatcgtttaagtcatttgacgattggattgctttggcacaacagctacacatcgaaagtggtgtgtcgaacctatttctttacaaacatcagtactatgcacagattattatttttatggagaatacgaccgaagcgtttgcacgggatgatttagcggtcgctaatgaatacgggcagaagtcagaatacacagcagcttttttaagtgaattcggtgaaaaagtcatggataatagtgcgcttgagttaacacgctactacttcaaacattaaaaataacgggttttcctaaatttaggagaacccgttatttttttgcgtattttcggtgggggtgataaataatgaaagttgcacagaccactaacgggtgcttaattcgcgccgatcaagcagccaaacaacagcaagtagcgcggtatttctgtccacattgtcaacaactggttcagttgcatcgtggggtgcataaagcaccatatttcgcacatatcgcagaacgtgtatctggtggtggtgagagtccagcccatctggcgggaaaacaggcgattgctgaattagcacatgcgttgggctggcatgctacctttgaagtacctgtcggcgagacacagcgcgctgatgtatggttaacgcggaatcagcaaccattaattattgaataccaatgcagcccattgacgccagataagttaaaccaacgaacaatcggctatcagcagcgccgattacctgtattatgggtggttggtgaacggtattgttttactaaccattatttaagccagcaacagttggggtttatcaactatcggcggcagtggggcttttatgtggtaagttatttgccaaagtgggggcaatgggtgttatatcaccatattgtcgcccgtgattttgctggttatgcttggcaaaccctgcgattgacaactaaggcgtttgtgcgcttgcttgtagcacaaacaagactgccagccaatcattataagggcaagtcacagcctatgcagcaacaaattattgaccgtcgattagggctgcaagacgcacattatgttgcgttacaggcggattgttatgcccaccatgaacgcttgcaagccgttccggactggtgttactgcacacgtaatgtaccacccatttatcagctcagtcagtttgaaagtcgggtaacgtggtggttgagtgcccaaccaattgatctttttttagcggtaacgcccttactccaacaaccactactaaagcaatccttatttgcacaatgggggcaaatagctttgaaacaagcattaaaaaagaaccgggggtcggttgaccaccggttctaagattaagaaataacatgcaaagcaacccgtgagagggtgcttttttgtttttgaagtgcttggaaagtctgttcaggtgttgtttcagcacaacaggcttgtttcaagagttcataggaatcgcaattttcaatcaataagcctgattcgctttcaccttttgaatagttgaagactactgctgaaggggtcatctgaatgttcatctcacaagataattgttgatctgaatcaaatgcctgtttagtaagtggactgtgccaatcttcaagtaacatttcggtatcaagtcctacgcgtttagcaattgtaaggactaattcgttgttaagttccatatctggttcacggaatgcttgttgcagttgcattaaaaatgattggctcttcttgcccccctggaacgttgctgccttataagcgagtactgcttcataaatggtgctgaaaacgtgattacgtaagtttaaatcatgactattttgttgctgaaactgcatgtaatgctcgacgttttttaagtttaagactggaataaacttaaaatgaatatttgcatcggtttcgccgataatctttaaaagtgcctcttcggaacgtaaacaaagttgcccgattgggttgataaataaaaacacttctaacaagttggttcctccaaaatttctatattgtatatactgctcgacgcgcttgtactgtctactctaacaaaattttaaaattatgcaataagttagcttgacagagtttaagcttgatggataagggcgcgcataattttattgggtggtatttgttcacttaattgatagcgggtgacaaatgatttaaaccaagttgccccttcttggacgttggtgacttcaatttcgacttcataatcctgggtttcgtcagggtattgggtaacatcaagcgttaacaggccagcaactaaagacgcggtctggcggtgcgttgttgcctgtccccagatgaacaattctttgataatcacggcttgtgctgcaaaatagacagcgatctgaccagacgataatacggtttggtgctcaattaagtgagtagcctgctcaagtgttaggcgatcagtgatttcaatcagactatgagcattttctacggttggcacctttagcgtctgttcggcataggtgtcaaagagtcgaatacgcaacccccagtgacgtttagccaatccctggttaggcagttcgaagtaataattagtttgcacaaacggcgctgcaaatggatagtccgcttttagttgcgaaaattgcgccgccgttagcatcgtcttaaattcgcgttcaatcgtttgtgacatcggttgagctcctttttaaaaaagcaatgttattatcctagcacaaaaaagcagacttgtaatgaaatttgtatttcagacgattattatttattcaattctaatctatgttaaaatagtgctgtatgtgacagagtgaatgaggggtttataatggtcgaaaattggaagaagtttttaatgccttatgaacaggccgttagcgaattaaaaattaaattacgtgggatgcgcaagcaataccaacaaaataatgaacatgcacccatcgaatttgtaactgggcgcgttaaaccaatcgatagtatcaaagaaaagatgcaacgccgctacattacagaagatttactcgaacaagatatgcaagatatcgctggtttgcggattatgtgtcagtttgtggaagatatccatgaaattgtgggccttttgcaccaacggactgatatgaaaattgttgaagaacgggattacgtttcaaatgttaaaccaagtggttaccggtcatatcatattgtaattgaatatccagtccaactaatcagtggtgaaaaattgattttggccgagattcagattcgaacaatgtcgatgaacttttgggcaaccattgaacattcattaaattataaatatcaaggggaatttcctgaaacgctgaaggcgcggcttaaaagagcggccgaagcatcctttatgttagataaagaaatgtctgaaattcgtgaagaaattcaagaagcacaacaactcttctcatatggaaaatggcaaaacgcacttgaaaaggcaactgaaaatgattctgaaggagagacgccagattgaaagtaacggtatttagcaatgacggtagttcttccgttcaagttgccaatcgcttaatgcaaaaattgatcaatacggggtttgtcattgatgatcaaacgcccgatgtggtcatttcagttggtggagatgggacgcttttatctgcctttcatcggtacgcccacgatttagcgcacatccggtttattggcgtgcacacgggacatttagggttttacactgactggcgcgattttgaagtcgatgatctagtcgtcgccttgcaagaagatctcgggcagagtattagctatccgttattagaagttaaaatcgaatatgcggatacgcacgaaatcagtcgcagtttggcgctcaatgaagtgacgttacgtcggtatgcagcgactttgcggacagacgtttacattaaagagaatttttttgaaagttttaggggcgatgggctctgtatttccacaccaactgggtcgacagcttatagtaagtcgattggtggcgcggttttacatccacgcttagacgcgatgcagatgaccgaaattgcgtcgattaataatcgcgtatatcgaacactatcggcaccaatcgtgttaccatcggatgaatggttgctcctgaagccttctaagacaagtgattacgttgtgacaattgatcaattcacatttaaggatcgaccaattgcctcgatgcaatttaaaattgcaaaggaaagaatacagtttgcacgttatcgacacacccatttctggaaccgtgtcgaagatgcatttattgggtcaaaacatgaaatttgaatggcaatatcaagatgcagaaggctgtgtgttgcggaattttttacggcggcataagctttctcgcagtcagttaactaaaattaaatttgcaggtggcacaatcctcgtcaacggccaggaggcacataccaatgcccaactggttcaaaacgatgtggtgactgtttacctcgcaccggaagtggccgtcgaacacgtcatcccagttaaaggggacttgaaagtggtttttgaagacgaccattttttagtggtcgataaaccggcgtttgtggcgtcgttaccggcaccgaaccatccgcacaacacaatggccaatttcgtcaaacaatacttgattgaccaaaatgctgagagccaggcagtgcacgtagtaacgcgcctcgatcgcgatacaagtggtttgatgatgttcaccaagcacggcttcgcgcatagtttgttggataagcaactccaatctaaagaattgcaaaaaacatatgttgcgattgccagtggtgatatgcggttagattatccgcaacatgcgtggattgatcggccaatcaaacggtcggatgatttttacatgcggcgggtcgttggggttggtggcaaacgctcattaacggaatattggcaagaagcccatggcaccgatgccacgttagttaagttgaagttactaacaggtcggacacatcagattcgggttcattttgcatcactggggcatcccttaattggtgataatttatacggtgtggccgatgatttattaccgcgtcaagcattgcactgtcgcgagttaacgttctatcatccatttgaagaacggtatgtcacggttcaaagcgaactaccagccgattttcaagcagtgatggatcaacgtcatttggcttttcctgcgggcgaattgaataaaatttgattaagctttcaatttgagtcgcaatctaactttagaatgagtatactaataaacgattatggattacggagggattagtattgtgttaactttaaatatgattaagacaatcattttagggattgtcgaaggttttacagaatggctaccaattagttcaaccggccatttagtgttggtcggtagtgttttgaaacttgatgaatcaaaagcattcatcgatatgtttaattatgtgattcaatttggagcgattatggcggttgtgattctatacttccataaattgaatcctttctcaccacgtaagaaccagctcgaacaaaaacaaacgtggacgttatggtttaaggtaattgtggcggtgattccatcagtcattattggattcccattgaatgactggatggatgaacatctgatgaaaaactggattgtggccagcatgttgattttatacggggttttgttcatcgtcatcgaaaatcgcaacaagcataccacaccgaaatttgctgatttaaatacgttaccttggttgacggccttttggattggctgtttccaagccttatcaattattcctgggacatcccgttcaggcgctacgattttaggggcaattattttagggacatcacggtttgtgggtgcggaattctcgttcttcatggcgattccaacgatggtcggcgtggcaatcttgaagattggtaaattcttgtaccaaggcaatacgtttacgggcgatcaatcaatcattttattagtcgggatgttggtttcattcatcgtttcaattatttcaatcaaattcttgatggattacatcaagaaacatgatttcaaggtcttcggttggtaccggattatcttgggcctacttgtcttaggtgcaatgctatttgcataaaggattaaattaaaatttggagggttcatccatgttaatcaaagaagtttgtgttgaaaatttcactaaaattccggcagcaatccgcaatggtgctaaacgaattgagttgaacgacaacttggctgtcggaggcacaacggttagccggggtgtgatggctgaatcagtgcgttatgcgcatgaacacgatgtaccagtgatggtcatgattcgtccgcgtggcggcaactttgtttataacgatcaagaattaaaaattatggaagctgatatcttttcagcgcaagaattaggcgctgacggcatcgtccttggttgcctaacacctgacaatcaaatcgacgaagaagcgatggaaatgttgattggtgctgccaatgggatgcaagttgttttccatatggctttcgatgaaattgcggctgatcaacaagctgcagcaatggaatggctgattgatcatgatgttaaacggattttaacgcatggggggccgttagacgcgcccatcgacgaagcccgtttaaaaacgttaattcaagctgctgatgggcggattgtgattttacctggcggtggcattacagccgacaatgtcgacgcgttaacagaacgtttacaaatttccgaagcacacggtacaaaagtggtcgggacattataagatagtaaaaggcccagtcatcaatgatgactgggcctttttttaatgtttaaataggagataatcgactgacgacgcactctaaacgtgttcacccagtcatctctttccggttagcgacgattgtcaaacgattgctttcagcaatcattcgccagtctaggctaatcctcaagagatacccgactgggatcacactctaaacgtgctctgtaaggcatccgcttccggttaaccctgagccgcaaacgattacgttgtaatcattcacgacgctgtgttaatcctcagcggatattcgccttacgacgcactctaaattttttctatcgctaggacttgtccttggtcggcgttgattgccttgtagtgggttacttggtaattggttggttctaggcgacttaagtcggcgattagatagtcgatttcttcttgagtttcattgaaccgaggatcaacaacgaataccagtaagccaccgcgattaagccgtgagagaatttgatgataggcagagattgtcgtgttaggcaatgtcacgtgttcaaaagaatcaggactgagtgcgcctaagctaaaaatagcggcttgcacttttaactcgggtggtaaggcagtgataatccgctcgtgtccttgattaagcaaagtaacctggttcgcttggtttgcttttgtaagacgatccgcgcaggtttcgatggcttctttttgaatttcgaaaccgtaaacctgaccaaaatcagcaacgcgttctgctaaaaataaggtatcatcgccatgccccacggtggcatcaattacgacatcgccgggccgaattgcctggtctaatagaaaatgtgcaaatttagtgggatgatcaagtatcatgtgttaggactccttcagatgcaataatttaaaatgaataaaacagtaccatgaaccgccgagacacgccgttgctaataaaaagccagctaagacatcactcggataatgaacaagtacgtaaatccgactaaggccgatgcatagtgccaatattaaacaggtgccaatcgctatttttcgccaaacgcgttgacgaattaagtagtaaactaggatgcttaaagttccgaaaaaaagaagtgcccccgaagcatgaccgctagggaagctgtagccgcctgcgtagacaagatggtgaaatgggggccgtggtcgttggacgctcatcttaataaagtggttaagcgttgaaaaaaggaccatgttaatgactaaaaagctagctgctgaccactgtttaaagcccagcaaaccaagcgttacaatggtggtcaaagtcattatactatagggattgccgatcgacgtaatcgcaatgcttacagtatccatcaatggggaggaaagcgaccggatgccagttctgataagggtatcaaaatgtataacccaagtggcatggtgcacaacgctgattaaaatgattagaaaactgattgtgccaagaatgaataaactagccgaaaatcgtttggtcatttttaagaaatcctttcaaaataagctgtaattaaagacaaagaagattattaaatgatacaataattattaggcataagacaactaataaaagtagttgcgtgataggattgttttccccatttattaatattataataaagttcaggtgaagctcaagttaattgtgccacagacaataataatggaaattcggaggcgttagaattgaaagagactagaaaacagcgaattgcagctcaaaaggtaagcttacataagcagaagcgggaaattagaattaagaaagttcgtaatgtgacgacttttgcaggggcaaccgtcttgatgggttcagcaattgcacctagtttttcgaatcgggccaaagcagccactgaagatgtgttaaatagtgcaaacaatgatgaccaagctataacagctaatacagcaagtagtgcaacatcatcaacaactagttcaagcacaacgacaactgaatcccaatcaacacaacaacctgttgtaaaacctcaattgactgaaaatgaagcgacaaaggtggctacgccacaaccggcaccatctcaagcgcaaccaatttctggagtgcaaagtacgagtgccaatatcgcaaccgctggcgttgttatggcagtagctaattcaagcgcacaaaatttcatcaattcaattgctagttcagctcaacaattagcgggtggtaacgatttgtatgcctctgttatgattgcccaagcatcattagaatcaggatttgggagcagtggtttaggttctgcccctaattataacttgtttggggtaaaagggacttacaatggtagttctgtttatatgtggacttgggaagatgatggtcatgggaacatgtatcagatccaagctgcatttagaaaatatccttcatactaccaatcgttacaagattatgtgcatgtgctacggaatacttcatttggtgcaacgccttattatcaaggggcatttaagagccatacaagtagctatcaacaagccacacaatacttacaaggacgttatgcaacagcaaccaattatgcgtcaagtttgaaccgtttgattcaacaatacaatttaacgcaatatgacacgccagggaccaatactggtaacaataatgggggaacaacgactccaaccacgccaacgactccaacgacacctgaaaatgggacaaaatacaccgttagagccggcgattctgtttgggggattgctaatcggtatgggatttcaatgaatgacttgattagctggaataacatcaagaacaatatgattcacccaggccaagtcttgattgtttcaagtagtgcagctggcaacaacaatggtgggacgacaaacccaacagaccctacaacaccaacgaatccaacaacaccagctaatggtgataagtataccgttaaagccggcgactctgtttgggcgattgccaacaaatatgggatttcaatgaacgatttaattagttggaataacatcaagaataatatgattcaccctggcgatgttctaacagtttcaaaaaccgcaactggcaatacaaataacaataattcaaacagcaataacggtaatcagacttcaaacaagacgtatacggttaaatcaggggattctgtctgggcaatttcaaaccgttacggcatctcaatggctgacttggttaaatggaataatatccggaacaactttatctatcctggtcaaaaattagtggttagccaaggtgcaacaactggtaattcaaacaacaataatacaaatagtacaaatccagggcaagcttctgggaagacttatacggttaaggccggcgattctgtctggggaattgctaaccgtaacggtatttcgatggcgcaattaatcaaggctaataatattaagaataactttatctacccaggtcaagtcttaaaattaatggctggcgctacaacgccaacgacgcctaacacgaattctgggaagacttatacggttaaatcaggcgatagtctttggtcaatcgcacaaaaaaataataccagtatcgcacaattaaaatcagcgaacaatttacattctgatttaatcttagtcggccaagtcttgaaattgaagtaagagtttggtatgctaagaacaattatttaacgttgagaaggattagtagttatcgttaagcgtttagagagcgtgtggttagtgtgaacacgtcgtttaacataacgaactcgcctttgagttttctattgaactgatagtagatagaaacgtctgccgcgttaaggccagagagttgtccaatatagattggacagaacttaggtggcatcgcggtcaattcgtcctatggtatttataccataggacttttttattggcgttaagtgaattaaaaaagagtgtgtcaaaagtgtccatgcttttgaaagcacgttaaaaaaaggagtgtttgatatgacttacgatcatcgcgcagttgaacaaaagtggcaagcttactggcaatcacacaaatcgttcaaaacaacagaagataaaaataagaaaaatttctatgcattagatatgttcccatatccgtcaggtcaaggcttacacgttggccatcctgaaggttatacggcaactgatatcttggcccggatgaaacggatgcaaggcttcaacgtgttgcacccaatgggttgggatgcattcggcttacctgctgaacaatatgcgttggatactgggaataatcctgctgatttcacgcaaaccaatattaatacgttcaaacgccaaatcaattcattaggcttctcatacgattgggatcgtgaagtgaatacaacggatcctgatttctacaaatggacccaatggatttttgaaaaaatgtacgaaaagggcttagcttatgaagctgaagtggctgttaactggagccctgatttagggaccgttgtcgcaaacgaagaagtcattgacggcaaaacagaacgcggtggctatcctgtttaccggaaaccaatgcgtcaatggatgttgaagattacggcttatgctgatcgtttaatcgacgacttagacctagttgattggcctgaaagtgtcaaggatatgcaacgcaactggattggccgctcaaaaggcgctgaagtatcatttgctgttgaaaaccacgacgctcagattgatgtcttcaccacgcgtgccgacacaatgtttggtgtcagctatatcgtgatggccccagaacataaattagtggccgatatcacaacgcctgaacaaaaagcagctgttgatgcttatttaaaagaaatcgaacacaagagtgatcttgaacggactgatttggcgaaagataaaacaggggcctttacaggtgcttacgccattaatccagtcaatggcgaacggttaccaatctggatttcagattacgttctagcctcatacgggactggtgctgtgatggctgtccctgcacatgaccctcgtgattgggaatttgcgaagaaatttggtttaccattgaaaccagttgtggctggtggtaatcctgaagaagctgttcacacagaacctggtgtgatgattaattcagatttccttgatggtttagacaaacaagcagcaatcgacaagatgattgattggttagtaacgcataatgctggtcatgaacaagtgagctacaagttgcgtgactggttattctcacgtcaacgctactggggtgaaccgattccaattattcattgggaagatggcacaacatcagtggtgccagaagctcaattaccacttgaattaccattaacaagtgatatcaagccttcagggactggtgaaagtccacttgcgaacttagcggactggttaaacgtaaccgacgaaaatgggcgcaaaggccgtcgtgaaacgaatacaatgccacaatgggctggtagctcatggtattaccttcgttatatcgatcctaagaaccctgataaattggctgactttgataagttgaaagactggttaccagttgatatgtacatcggtggtgcggaacatgctgtgcttcatttattatatgttcgtttctggcacaagttcttgtatgatatcggggtcgtgccaacgaaggaaccattccaacacctatataaccaaggtatgattttaggcgataaccacgaaaaaatgtcgaaatcaaaagggaacgttgttaaccctgatgatgttgtcgatcgctttggcgctgatacattacgtttatacgaaatgttcatgggcccattagatgcttccatttcatggagtgaaaagggcttagccggcgcgcgtaaattcttggaccgggtatggcgtctatacacagaagaagataccgacgaaaacgaccaactttcaagcaagattgtcgctgaaaatgatgaacaattgaagaagagttacaacgaaactgttaagaaagtgacagaagacttcgaaagcatgcactttaacgtggccatttcacaattgatggtcttcatcaatgatgcttataaagttgacacactaccacgtgaatacgctgaaggcttcgtgaagttattagcgccaattgcaccacacatgatggaagaattatgggcaatgcttggccatgatgactcaatcagttacgtggactggccaacatttgacccagcagcattggtcgctaacgaagtagaagtgatcttccaagttaacggtaagttaaaggccaaagtaacagtagctaaagacacaccgaaggaagaattagaagcgatggctaaggcaaatgaaaaagtagctgaattcattgctgacaagacggtgcgcaaagtgattgccattccaaataaattggtcaatatcgtcgccaattagagtgcgtttcaaaaagagtgggttcaagctcggtcaacttttgagcattatcagagggaagcgaataagcgacgtagtcgattgtttgattcactgggataagcgcagaaagttagcttgaaaagcacgtttcagacaagagtgcgtttggttgcggttagcaactgagcattaataaaaaatttcaaataatccaggttttaggattatttgaaattttagattaagcggaagttgttgcaaccaaaaagcatgtttcaaaaaagcagttactgtttctcgcagtaactgctttttcttatttaaaattaatatttaggggcctaattatccttcaattaatataagggttattctaaagcgcttttaagatgataaaaagatgagagcgactattgcttttgggtgttttttattatacgatgataagtaaatttagattctggggttaaccaataatgatgatgctaaaatagaggggtttgaggactatgaaacgaaatttaactgcccgtcagatgcagatgattgcacttggcgggacaattggggttgggctttttatgggggccaacacgacaattaaatggacggggccgtctgtgctgattgcgtatgggattgctggtttattgctgtatctcattatgcgtgcacttggagaaatgctgtatgttgatccagatacggggtcctttgccaagtttgcaacggaatatatgcatccaatttttggttacttaacagcttggagcaatgtcttccaattcgttgtcgtggggatgagtgaaatgattgccatcggcggttacttagaattctggtggccgaacttgccgggctgggtaccgggactggtcgcgattacgttcttatgtgcggccaacttaatttcagtcagcatgtttggtgaattggaattctggtttgcgttgattaaagtcgtcacgattattctgatgatcgtggcaggccttggactcattgtttttgggattggaaaccatatgcatccagtcggcattagtaatttgtggacgcacggcttctttacgggtggctttaaaggcttcatcttcgccttggcaattgtcttggcatcatatcaagggattgaattgattgggattacggctggcgaggctgaaaatccacaatcaacattggttaaagcaattcaatccactgttgcgcggattttgattttctatattggggcgattttcgtaatcttgagcatttatccttggaatgaattgagtcaggtcggttcaccgtttgtgcaaacctttgctaaaattgggattaccgctgcagcatcaatcattaactttgtagtgattacagcagccttatcgggtgctaactcagggatttacagtgccagtcgaatgacgttcacattagccaataatgggcagttaccaaaacgattcttgaaattaaaccgccacggtgtcccattttatgcggtcggggcgatttcattagggattttaatcggggtgattttaaacgccattttaccacttgtttatccaaaagctggcaatgtcttcgtgctcgtttatagttcaagtgtcttaccagggatggtgccatggttcgtcattttgatcagccaaattgcctttagaaaacaacacgctgacaagatggcacaacatccatttaagatgccttggtcaccttattcgaactacattacattggcgatgctagccatcaccttaatcttcatgttcattaatccggaaacgcggatttcaatcattgttggtttaattttcttaatgatcatggtggttatttatttcgtgaaatttggtcggcaaaaataattacaagcaaaaaggcagcctagttggctgtcttttttttattcgattggattgatttgatcgcgatgtaaaacagtgattgattcacccgctgtttggcggcgatcaatgttatcttcgccccataaacagaggagatttaagattttattgagtgactgaccgtattcagagaggctgtattcaacgcgtggcggaatttcttgataaattttacgattgatgatgccatcgttttcgagttcgcgtaattgtgcagtgagcaccttttgggaaatctttgggatgcgttgtaagagctcgcttgatcgccgtggttggttgcgcaaatgacaaagaataacgggtttccatttaccgccgataatttccatcgtagcttcaacgccaattttatatgttttctcattcatttctaattttgattcaccttttcattgtgataagactcaattattacttttcagtaacctactgactaaaaagtgcgtgattgtgaaaatgacgctcctattgaataatatagtacatcagtaaaaaagtctaataggagtgtggcagtatgagtagtaaacaacgggcgaacctcacattactagcattggcaatcagtgcttttgcgattggttcgacagaattcatcagtgtcggcttaatgccattgatgattaaggattttgggattacgatgagtcaagcaggactaaccgtatcgatgtatgctttggaaattacgattggggcaccgattttggcgattttaacaagtcgttggccacggaaaaatttattgttggggattatggttgtctttatcattggtaacttgacggtcgcttttgcgccagtcttcgccgtcgtcttggtgggacggattatttcatcattagcacatgggatttttatgtcaatcgcatccgtggttgccgccgatgttgttgaaccagaacgacgcgctagcgcgattgcggtgatgttcaccggcttgacggtggcgaccgtgactggggtaccactgggaacgttcatcggtcaggtttcaacttggcacatgtcgtttatttttatcgcagcaatcggtgtcttaggccttgttgcgaactggttcttagtgcctaatgatttactattgggacaacccagtcaattcagcgggatcattcgcgtatttaaaaataaagcaattgtggtagccttattaatcacagcgcttggttatggcgggacgtttaaggtttatacctttgtaacgccgattttagaatcaaaaatgggttggtcaccaagggccgttgtgatcatcttaattatttatggtctgatggtggcttttggaaatacgttgggtggcaaatggtcaaatcaccaaccgttgatggcgctattgaaaatgtttgttggcttgttagtaaccttgttgctattcatgttaacgttaaatggccattggttcggtttaattaacgttttattgatgggctttttcgccttcatgaacgttccagggctccaattatacattgtgcagttggctgaaaaaatcacgccaaatgatattccattggcttcggctttgaatatctcagcctttaatatcgggattacgataggctcattagttggcgggcaagcatcggcagcttggggcttagacagtacaccaatctttggcggtatcatggtttttgtcagcattctgttgacgtggtatttgattcaacaaagtaaacaagctaaataatgagatggcagagggctccgcgaaggcggggatcttttttgaaacgtgctattggcgctagatttctgcgcctaactacaaaacgggaatcatggccgagtacgccataattcccgtttttaggttagtgctcaaaatctgggcaagcgctaatagcactcttattgaaacgtgcttctgatgacaacaacttccgcttaatctaaaattcccaataatcttaaaacctggattattgggaattttgtattaatgctcagttgctaaccgtcatcagaagcactctttttcataaagttttgttaaaggaattgcaaggcttggggcaatcctctaaaatggtaggaagatgctttttgacgtttaataagggagttatgggaaatgaccaattcacctgaaacaaaggcgacggatagatcttcacaaagtaagatgttacggggctccgcttggatgaccgctgggagtattttctcgcgaattctgggcgccgtctatgtaattccgtggccaatctggtttggcgcgaatttcttacaagccaacacattatttgcaaaaggataccaaatttatagtgtctttttagtgatctcgacggctgggattccaggggcgctatcgaaacaaattgcacgctataacgaaatgaatgagtatggcattggtcagcgtcttttcagaaagtcgctgattttaatgttggcaatgggtgttttatcagcgctcgcactctttgcgttagcgcccgttctagcagcgggtgatccgcggatggtaccggtcttccggtcattaagctggccgctattgattattccattgctcagtattatgcggggctttttccaaggctatgccgaaatggcgccgtctgcgatttcgcaatttattgaacaagcagcccgcgtgctgtacatgaccgtgaccgcttttatgattatgcaagtgtttaaaggcagctacgtggatgctgtgacgcaggcgacatttgccgcattcattggggctgctgccggcttgttattactgattttctattatttgaaacaacgcggtcgcatttcagagttagtggccaatagtaacaacgaattagaagtgtcaacgactgacttgttaaaagggattgtgcgccaatcaattccattcatcgtaatcgacgcaagtgtcaacttggtctatatcatcgaccaatacacgtttaatccgatgatgcatgatttcgtggttgccagtgatcatcagttgtataacttgtatgctttatttgcagctaatgcgaataaactgatttcaatcaccgtttcactcgctgctgccatggcggtcacggcgattccattgatgtcagctgcgcatgtgcggggcaatcaaaaagaattgcaacatcaaatcggcagtactttgcaattattcaacttagtgatgattccagcggcatttgggatggcggcggttgccggtccgctttacacgttattctacgcgcatgatatgcttgggattagtgtcttacaattttcatcttacatttctattatgctcggcctctttacggttttaggcgctgtcttacaaggcctctatcagaaccgcttggcattgttttacttattcatcggattcatcgtcaaaattgtggcgcagtacccagcgatttattttttccgtgtctatggcccgctagtatcgaccggcttagcctttgcgacaagttcggttttaatgattgcagcactgcatcgctattatcactttgcattacgcaaaaccattcggcgcttaatcggcgttttaggcttctcattggtgatgtatttggtaacggcgggggcagtcaaggggttataccttgtctttaacccgtacagccgtcttcagagcgttctagtcttaatgattagcgttggcctaggtgtggctgtttacgccgcattggtgcttaaatcgcgcttagcggactatgtcattgggagtaacttggatcggtttagaagaaagttgagaatcaaatgagaattgatcgctttttaagtcatatgaatgtggcttcacgcaaagaattaaaggtactttttaaagcgggacgcgtgcgcgttgatgggactgtggtcaaagatgcgaagttcaaagtgaacgaggcgaccgttgtctatgttgacgacgaacccgtgcgttatcaaacctatttttattggctgatgaacaaaccggcgggtgtgatttcggcgacgactgatccccagaaaacagtgcttgatttattggcaccagcggacttgcgggatgatctgtttccagtggggcgattggataaagatacaaccggcttattattgttgacgaatgacggcgatttaagccatgccttgttgagtcctaaaaaacacgtcagcaaggtttatcgcgccacgattgccgggattgtcacggcagaggatcaagcgcggtttgaagcggggctcgtgttgagtgattttactgcacaaccagcacagcttgaaattctgagtgttgatgaggcgcaacaagaaagtcagattaccgttgagattcatgaaggtaaattccatcaagtgaagcggatgtttcatgcggtcggcaaggaagtcttgacgctagaacggcttaagatgggaccactggcattgccagatgatttagaccgtggccaataccgtgcgttgacagatgcagaacttgcattacttaaagcgaattaataaacagcagccctttcaaaaggactgctgtttttttaagattgatgaatcattttagccatatagtgtggtaaggtctgaatcacttggctaggaagtgtgacgtattgggttttggcgagttcatcagcaatcgcactgtgggtataaacagcggcacaaatcgtctgatagtgggtgccaaattgaccacagaatgcggcaataataccagtcagtgtatcgccgctaccgccagttgccatggaaggcccaccgatggttagttgctgaacctgttgctgatgatagacctcagtgtgatgttttttaagcactaaagtcgcgtttggataagcagcgagtgcggcttgattagtagcaaccgtttgctgctcgattgcaatgccgctgaggcgcgcccattccatttgatgcggggttaaaatgagttgcgtattcgggatcgtcagtttttcatgtgcgatgattgatagtgctgaaccatcgataatcagtgtttgtgttggttggatggtttgtaagatttttctcagcagttcaacggcaaacgaagtaatgccaagaccaggtccgacaacaacgacatcagcagcctggactgcagacgaccactgcacgaagggttgttgataatcaatgaacatggcttctggtaagcgcgcgtgcagtccgctgagaacacttaagtcactagcaacggaaactaatccagcaccagcataaacagccgcagaggcactcataatcgcagcaccgccgtattgctgactaccaccaatgattaagacgcggccaaaatcgcctttatgactgatggcaggccgtgcctgcaggaccgcacgaacggttgaatttgtgatgacttgcatctgaatccctcccttatcaactattattataagcgaaatattaataaatgggtattggcagggctctgtaacactggtacaatagtcttgtagcacaatcgcccgtgtggcggaactggcagacgcgcagcgttcaggtcgctgtttgggtaaccaagtactggttcgaatcctgccacgggcattatggattaaaaaaggatcgctatcactttagatagcggtctttttttgttcaaaaagtacatcgattattgattatttacctcattatgactggtttagccaatggattagcgacaattattagcactattcaaaaaagttgcatcaattttaaggaattaaaccattagtagaaaacgatagctttaaataaatattttcttatcaatataattattatttgaactataaaaacggctgaaagctacaagctgtaaactgcatcgcgattaaaaggtcatttaataaataaaaacatcacaaacttggcgaatttcaataaaaaaatattaatagggttaaaacttattaaaaatatttttttgtcaataccgttaatttcagctatttacatttaattaatttatataatataatgcctgtggagcagagcaggattactagttcgcatattgtaggtcctcaaaatagatagaaggagtaatgcttattatgaataatcaattattaatgctcattaaatatcgtaatattttggatcaattatttgtcacagttttgcaaaatgttgacttatcactcgaacaatatttgttgatggaaaaaatggatcgtgaaaaagaagaaacgcccggcaaccttgctgcttgtatgggcgtttctcgaccagctatttcccgccaatgccaatcgttgggtgaaaaaggattaattgaacgggctaatgtggggagttttattggtgatagtcgtaaagtatactatcgacttacaaccaaggggaaacagttattattaaagattagactaaacagtaatgacatgattgatagtttggattctggatttgttactaccaattgggatgaaattgataaccaaattgcgctaatgtccgacgcggttaaaagaacattcaatatcaatgagattcaaatcttttagagagactatcggaatctgaacgggggagttatttagtttagcgcgtgttaatgggcaggatcgaagcgatggatgtcgagtatgattatttttgaatgtaaccggttgcgatgaattggcataaacggtatattattaaggtatctaagggataggagagaactaagcatgacaattaaattaatcgcatccgatatggatcataccttattaactgagagtggccagttgccaccaaactttataccaaccattcagcaattacatgctaaaggggttcaattcgcagctgccagcggtcgaccaatgtacacgttaaagcaaatgtttcccgaacttgctgacacaatggtttacgtcagcgataacgggggtgcaattggttatcaaggtgaaactttattcaaaagtttattgccgttagctgattaccaacggatggtccaattcgttaatcaaacgccagatgggattggcgtgatttgtgggatggacgcggcgtacgttgaaacacaatatcgagattatgacgcgactttgcggcaattctatgccaacattgaatatgtacctgatttaacgcaggttagtgttgaagccaacaagtttacgatttatttcccgggaaaagatagtcaagcacagtatgaagctgttttcgcacccgaatttgaaccggcttattcagtaacggttgctggtgttgaatggatcgatattatgaatcaaggcatcgacaaaggccatgcaatgcgctttttggcggattatttcaacatcacgccggcgcaaatgatggccttcggggatacttataatgataaagaaatgctgcaaaccgttgaacatagttatttgatggggaatgctgccgacgatatgatccaatatgcgacttatcgtgccgacactaatgagaactatggtgtgttaaaggagattcagaaattactttagtcaaccaatcgtagatgaattggtaatgctgggtagcatctgtttctaataaaatttcatgcgctgtatgaggtagaatgcgcaccgttgcgttgttaacggtgcgctttttgaattggttcgttaaatgccgcgcgcggcgaccataaccgccagctggatcgtcggcgccactcattacgagaactgggcgggattgtaaggcaagttgccaatcagcatgccgagttaactcagtgagggtgaagagcattgcaaaaccgctatttgaaaagacgtagccacacaatggatgctgttcgtaggccgccacgtttgcttgattgtaacttaaccatgaaaaaggtcggtgagcatcaaatcgtttaggatagaccccaaacgccaagttattccagacagtaccggggcgcttagctgcaatggcgccgattaatttaacgattggtaaggcgggtttaagaatgaagggtacatcgataacgcccatgaagatggctccagtaatcggcacttcagtttgcttaacatattgtgtcgctagcattgagcccattgagtgtccgagcacaaataatggtagctctgggtattcctcgtggacaatgcgaccgattaaggtacaatcgttgactagcgtctggagcccgtttggcccgaaataaccgagctcatcgttggactgaacggagtggccttgcccaatatgatcgtgtccgatgacgataatcccacgatctgctaagaattgagcgaaagcatcataacgttcgatatattcggccatcccagttagaatttggacaactgcgaccggtttttggattggaaaccaagtcacgacatttaaagtatggattcgatcagtagattgaacggtcaatttttgcattggttagcgcctcccgaaaaagataacgtactttacgattcattttagcagaaacaatctagagataccaaaaggacgccaaacaactttaaccgttgtttggcgtcctttttagtcatgcttaaagttgcacatcatcgttaattcgtgttgcgcgtgagaagtatttcgaatagaagcgactgataattccccaatagtaaaagatgagggctaatgcgctaattaagacgaaatcgagtgggtaaggaatcaggttaattccgttgaattcccgactgcccaagaatgaaatcagcgaaagcaatgcgagatagataattaaccataagcttcctttgaattgggcccaagtattttcccagtgaatccgatactcatagtagaaataaaatggtaagccaagcataatgacgccaatcaccttaatggttgttggccacattgcccagtaagttgccaaactggcaaggacaaaggataatggcgacatgattttcatccaaggtgaatgaacagggcggttcatatcaggggccattttacgtaatgacatgacggtgaccgggccggttaaataggcaatcaacgttgcggttgaaatcacgctggctaacgttccccaacttctaaaaattgaaacgagtagcatgctgacgatggcgttaatggccatcgcaatgcgaggaatattatattgttcgttcatgcggccgacaatcggtggcatgtgtttgttctgctttaatgctgctaatgtccgtgcacatgaagcgacaaaggaaacgccggtcccaaagggtgaaacaaacgcatctaagtaaagtaagacggctaaccaatggattccaagtaaaatggctaagtcggcaaagggtgattggaagtttaaaccgtgccaaccgactttggcgagcaaggcgggtgaaacagaaccgataaaggtaatttgcaagagtagataaatcacaatactgatcccaagtgaaattgcaattccacgtccaatattccgtttagaatcacggatttcactgccgacattgattactgtttgaaaggcattgtatgaaaagataatcccagaaatcgaagtggctgcaaaaattttggcggaaccatagggcataaacgtcgccattgaatgcccgaagttgccagtatggaaaccagttgagactaacataataatggttaataatggcacacctaatttaaagattgcaatgaagctggtaaaacgggtcaagaatttaacggaccagaaatttaaaagggtgaagacgatgataaaggcaaagacgacgagcaagccacgattcgaaatttcagcgtggtgcataaagtgattcgtccagttagcccacgcccatggccaagaactcatatactggacagcagcgacggcttcgattgggataatcgtgactaatgatacccaattggcccacgctgcgatgaagccgagtaatgaaccgtgactatattgggcatagtgactcatcccgccactttcaggaaacatcgtcccgagttcaacgtaattaaaggcaattgcaccaatcacaattgcgccaacaatccaagagatgatggctgctgggcctgccacggtcgttgcctcccatgcaccaaacagccaaccggaaccgatgatggaacttaaacctagcatcactaggctaaataaactcattttgttcttctctatcataaagacctcctgtgtatggtgtgccattatagcaaccatcaccgttggtttcaaattaaaaatgcggctaaaatgagtcgtgaagtctatcaaattaacaatggtaacgccttctgaattaattattaacaattaaaaaaaccgtcacaaaaagtgacggttgaatagttaatttaagtcaattgccccgttgaatggcatccgtttgtttaaaaagatttaatttacgatcgttccagaatgtttcagacatatcgcgatagaagatcgcagtctgacagcctgggcaacgtttgataccatattcaattggcgcctgacatgcagggcaatgaaatgcggttgattcaggaattgtattttgcgaatcggccattaaaaggactccaatcaagttgttatcaatagtataccgcatacatacgctatttgttaagcgtttaaacctttttttttcaaaaaatatgcacaaatcggaaataatatgctatactatatcaagtaatgcgagtgtagtttagtggtaaaactcaagcttcccaagcttgcgtcgcgggtccgattcccgtcactcgcttaaagattcatgcaaaagaggttgcaacagaagaaattttgttgcaacctctttttttattctctgaaatttaatcctcggcggatacccgacttacatcacactcttttcgttatcagacctaaggccgattgtttgtttaaaggcgctctgataaagtatatttattatctatcgactaaaaaatcgtgacacttacgagcaatctaagtagtgggagcgtacgacattgacattattagagattaaagatattcacaagtcctattatatgaacaaggctgaatttaaagtcttaaaaggcatcaatttaagctttgaccgtggcgaatttgtttcaatcctcggggaatcaggcggcggtaaatcgacgttgctgaacatcatcggtgggttagatcaccactacgatggggagctcatcgttgatgggacatctttaaagaatgcatccgaaaagaaatttgatgcttatcggagtcaaacgattggctttattttccagagctttaatttaattagtcatttgactaacttggaaaatgtgatggtgtcacttgaaatgactgatctatcacataaggaacgggttgccaaagcgaccgccttattggaacaagttggcttgaaggaacatatccataaacatcccaaccaattgtcaggtggacaaaagcaacgggttgctattgccagagccttggctgctgatccagatgtcatcattgccgatgaaccaacgggtgcgttagatagccagaatacggccgagattctcgaaatcttacaaaagattgccgaagatggcaaactcgtcatcgccgtaacccattcacaagccgttgctgaccacggaacacgggttgtccacatggttgatgggcagattgattatgacaagcaattaaaaccagcttacccagctccaactggtccggtaattaagaagagtagtccattaagttttatgtctgctttcaaaatggcaatgcaacacatgcgctacgatattaaacggaatttgctcattatttttggcgcgtccattgggattttctccgtcattttaatgctaggcttgggtcaaggggtgactggctatattaatgatcagatttcatcgcaagttaatccaaatacgattcagattgcaagaaacctcacgcgcaaacagattgaagccggtgaacaaggtaacttagctgataaggatatcaaccgccttaataaggtcaaaaacgtgacgaaggttgaaaagggctactatatgaatggtgtccaagtgcactatcaaaagaagagtgaaacagtccaaatgttccaaacgtttaataaaaccgaacgtgtccaagatattaagaccgggactaaacctggggccaacgaaattattttaacgaaggcaatggctaagaagttagataaaaattacaagaagatggttggtcggacagtaaccatttacgtcaatgccattagtaaggatcaacgtccagttcaaatgcgccaagatgtgaaagtttcagggatcatcaattctgggactgaagccgtcacatatggcacattagccaagatgtaccaagcgcaaggattagagtttgcacccaactttgcagcagtcacggttaataagacccaaaatgttaaagccgttcaaaataaaatcaaaacctacactagcaaagtcaacggtaagacacaaaaggattaccaaatcacaggggttggtgcgatcctcgattcaattaacacttacttgatgttagccttctacgtcttagctgggattgccgggatttcattattggtttcagcaatcatgatcatcgtggtgctctacatcagtgtgtcagaacggacgaaggaaatcgggattctacgcgcaatcggcgcccgaaagaaagatattcggcacttattcgtctcagaagccttcttgattgggttattatcaagtgttcttggtgccggcattgctggccttggacaattgcttgtcaatacgttggcccaaccattaacgcatatgccaattgtggcaattaccagtggctacgtcctattcgggataatcatcagcattatcatcagtctcttagcggcactagcaccttctcgtaaggcagctaagttagatccaattgaagccctcgcggcagaataattgcgcttgaaaagtgcagctaagttctatatactaattatcaagttcgaacagtcaaaagaatagcatcaacagcgatttatagcgagctcacagacggtgtaaggtgggtaatcaagttgacgcggcgcgcttttggttgaacaattgcatactattgagtggatcgattgatcaatcagagtggtaccgcgggaattctcgtctctttcatttatttggaagggactttttttgttcacaaatattaggaggctatcaacatggattttaaacaacaagtcaccactgccttaatgggcgttttaggggacagtttaccagcagataaagtagcacaactcattgaaacaccaaaaacatcagacttaggggactatgcttttccaacgtttatcttagcgaaaacattacggaaagcaccccaacaaatcgcccaagacttagtcgcagaaatggatcaagccggctttgaaaaagtgattgccaacgggccatacatcaacttcttcttggataaggctacgtttagcgaccaaatcctcaaaaccgtcttaacgcaagccgctaattacggccaaagtgacctcggtaaagggggcaacgtgccaatcgacatgtcatcacccaacatcgctaaacccatctcaatgggccatttacggtcaacagtgattgggaactcaatcgccaaaattttgacaaaagtgggcttcaacccaattaaaatcaatcacttgggtgactggggtactcaattcggtaaattaatcgtagcttataaaaaatgggggagtgaagaagaagttaaagaagacccaatcacgaaccttttgaaatattacgttaagttccatcaagaagacgttgaacatccagaattagacgatgaagcacgggcatggttccgtaagcttgaagccggggatgaagaagcaacgaagttatggtcatggtttagaactgaatcattaaaggaattccaaaagatctatacgatgttaggggtcgaattcgactcatttaatggtgaagccttctataacgacaagatggacggtgtggtcaacgcacttgaagcaaaagggctcttacaagaaagtcgcggtgctgaaatcgtcgacttaacagcttacaacttgaacccagccttgattaaaaaatcagacggcgcaacactctacatgacacgtgatttagccgctgcgatgtatcggcatgacacatacgacttcgtgcaatcattgtacgttgttggtggcgaacaacgggaacatttcaaccaaatgaaggccgttttaaaagaaatgggcaacgattggtcggacgaaattcaccatattccattcggcttaattactcaaggtggtaagaaattatcaacgcgtagcggtcgtgtgatcttattggaagaagttttaaatgacgccgttaacctagcacaacaacaaattgaagccaaaaaccctgatttaccaaacaaagaagaagttgcaaaacaagtcggcatcggtgcggttattttccatgatttgaagaatgatcgtttagataattttgactttgacttagaagaagttgtgcgtttcgaaggtgagacaggtccatacgtgcaatacacaaatgcccgtgcccaaagtatcttgcgcaaggccaaccaagaagtcgcaatggacgctgacttagtcgtttcagatgccaacgcttgggatgtcttgaagatgctcggcaacttcccagatgtgattgtcaaagccagccaagaatacgaaccatcagtgattgccaaatacgcattacgcttggcaaaagccttcaacaagtattacgcaaactcaaaaattttggcagacgacgatcaaaaaaatgcgcgtctttcattagtgaagagtgtcagcacagtcctagaagcctcactagacttattaggcgtacaagcaccaaaagcaatgtagagtgcgtttaaagcggtttgactctgagcatttgcctaatatcgtgaataagcgacgcagtcgattgtttgcgatatgtagcaaagcacaagagtcagctttaaaaagcatgtttaaaaacagagtgcctttgaaacggtttgaccttgaggattaacaaaaaaatagcgattatggcgggttttagccataaccgctatttttaggttaaccggaaaggtcagtttcaaaaagcacatttaagccacccgattaaatcaatctggtggcttttttatttttcgaaaaattctaattcgatgacaaccccgccaacttccgttatagtaatcttgaaatagtgggggagggttcactaatggtattagtcttaaaacgccagattaaagggattccggttttggaagtggtcgctgacgaacaacgtcatcagccattaccactcgtgatttactatcatggctggcggtcagcaaaagaattggttttaacgcaagcgcgtaaactggctgaagctgggatgcgcgtggtattaccggatgcactgaatcatggtgaacggctgcaacctgtttcagagattccgtcatggactttttggcaaagtattcaaaccaaccttgccgaattcagtttgattgttgattactggcaccaacttaatttaattcaagctgaccgcatcggcgtcgggggtgtttccatgggtgggatgacaacggcggcactcttaaccaagcatccagaaattaaagtggcggcttgtatcatgggctcgccggcaccgctagcctatgcgcgcttagttcgtgaaaatatccgtgcgcatcagttagcacaacctgacgatctagggttattgacaagttggttaacggcctacgatttaactgaacagccgcaggcaattgctcaacggcctgttttattctggcatgggacagcagatgaacgaattccctatgaacaagtagcagcttttgaacagcagattaaaggtcaaacttatgccaaaaacgtgacatttttaacagcaaatggtgaacgccatctggtgaagccagcgctgatgaacataattacagatttttttagtacgcaactataaaataaatcatttttaaaaagccaacgttaaattcttagcgttggcctttttgacgtgttttatttcttggaatattaaaaaaataatgatttataatggggattaaaatacgaatttagacgactttttcattggtttggtatagcgggaagaatgctttttattatttgtataatacgtgttgtatgcttatcggtctaattgtttatcgcagtaatatggattttatgtgtcgataatatttatggaaacaattatctgtttattatagacggagttgatgaagcgtgttaagttaaatgtgttccaaaaataattttttaggagatgagactatcaaaaaagtagtaggtattttagcgttcggcattttaacgaccagttgcatgagtattttacaagaagcaagggctacgaccagttctaattaccaaagtaagcaaagtgaggtgcttgatgatagcctccaacctaaggtgaggcaccagaagggtgtaacacgttcagaaaaggcgccatattcaaaactgtatattggccgcggtgatgttaataaagaattggctcggcaacaaagggccttgagttattcaagcttagagccttccggattatacgccaaaaaaggggacgtgctgacggtgagcaaaacgggtcaagacttgatgtctctgacgattggctcgcctgagcgagatgttcagaaacgatatccgctcgtaaatggggtgacgactattacagttgaaaatgatggccctatttatgtgacgaatccaaatgattcaggcggtactagggtgtcaatctttgatgccactggtgaaatgccgttctttgatgcaaacaagacgagtgtcgaagattttaagaaacaaatgactgaaatgacagacgcaaaagatgttcaacttgttagtgatcgtgctttaattactgtgagttatgagatggcaaagaaatatttgggggatcccaaagcgttaatggctaattatgaccgattcctggtcgctcaagatcgagtttcagggatcagtaatgaaggtcggccggttaacttttcagatcgccatttacaacatttcttagaatcgccatcgtattatatgtatgcgacaaacgaatacatgggttttaaagacgatgcagctatgaaaagtttattagaacttcaggatccttgggaaatctggcatgaaagtggtcatcagagacaacaaaaaccatggacatggagagaagttgtcgaatcgagtgttaatatttattcgttagcagcgcaaaaagaaatgacgggtgcgatgcctgatttagataagtattatccagaaatgtacgcctatctaaattctgatcataaaaacttcaatcaacaaggggactttgtcaaaatgacaatgtttgcccaactagcaaacacctttggcgatgatttctacccgatcttacatcagtattatcgcgaaaatcagttagcctatgattcaaatgaagatcgaatgcagcattttttgttacatgtctctgaagtaacgggctataatatgctcccttattatgaacaatggggatttaaagtttctgaagaagtacagaagaaaatcagcaactacacaacgttggctgacccaatttggttaaatgacaatcaaactaaaaaacaattgccaatgagcttaatgaaggctgtgtcgctcagtaaacaagggattaaagttgacttaacaaactatcaaattaatatctttaaggatcagaaattaattgttaagaaaaatggcaaggtgatcgcggagttggctgataagaaaccagctaatgggatagttattaatgatatttggcagattgatgaaccacttgatgtaaccgatatgattatcattgaacaacaaaatgccaatgggacttataatcggtttaatcaatcgatcagtgggacttcgcttagggaacaattggaaaactatttaaacacaacaaaaccaatcgagacgattctaacgcaagataaattaaacaatctacgccgacaggttgatgcactacaacctaatactgataaagaagaattaatggagatggttaaaaagctccaacaaagatatttagacgtattagttggtgaaattgaactgaattcagaatcagaacttgtggtgacatttgctgatggaaaacttaaggaatatgacgatttaaaagttcaagcagatacacatacgattgctcaagtaacgaatggtaagccgaatgttggtcgtgttgaaggaaatcaattgattattccaaaccaaaaagatgccactgcgatctcgatagcggtgactttaccgcatggcacttatctagtgaaagtgattagccaatcggtgcttgttgctagaaagttagtatcggatttatttgaacaggacggtaagttgaaaccaaatgtgacgcaagaagtgttagatcgagcatggcagcaagtaaatcagttaccacaagacagcaaagaagcgctagcgaaaaaaatgaaggaggcacaacagttattcttgaatgcgcttattgcggatgtaacgcttaaagatgccaaaatgatggtgacttttgcaaatgacctatttaaaaaatatacgattcttgtcatggaagaagaccacagcatagggacaatagtgtttggccaggcctttgagggagaattaagcggcaatgtctttacaccaatgcgtttaacagtttcgggtaaaacgtatcgggtaaacgttatgcacaatagcggtacctatcaagttaaaacgttggtagctgattgatgggttatagcgaaaccagataaactaatctaaaggcttttttatgaaattaaattgaaatacaaaattgatatctatcaatgaaaggctgagcaatagtgctcgcctttttatttggtttcaacatttgataatccccatttccgtggtagtctgtatataaagcattatcagatggaggttaggcaaacgtggaaaatggacgacttagacgtgctagtcagtttaataagacacggtttcgctttgtgggcaaagggttattagttggggcgttcactggattggtggtcagtttatttcgcttagcgattgaaaaaggactggcctttgttatcactatctatcaagggttaaatgcacacccgtggtattgggtgccattggttggtgccaatttattgatcggcctgcttgtggcacaattattaaaaaaggaaccgaatataagtggttcggggattccacaagttgaaggacaattggaaggtgagtttgatttcaattggtggtcaatcctgtggcgtaaatttgttgggggcattttaagtattgcacctggcttattcttgggacgagaaggcccatcgattcagctgggggctgccgttggacagggggtcgccgctaagttggtaaatcgcggtgctgatcgtcggattttaatcgctagtggggctgccgcgggcttatcggctgcgtttaatgcaccaattgccgggacctttttcgtactagaagaaatctaccataacttttcaccgttagtttgggtgacgtcgcttgctagcgcaattgcagcgaacttcatttcattaaatttttttggtttgacaccgacattacatattacgtactcccaaagtttgccaattaatcagtattggcatttgttgatacttggtgtcgtattaggactgttgggatacgtttatcagaaggtattattgtagttaccacaactttatgcgaagctcccgctgccaaaagcgtataccggattagtgccattattatgtgttttgccgattggttatttctggcccgaaattttgggtggtggcaatggattgattgcacaccttggacaaaatttaccgacaatcagtgtggtggccggtctattcctattacggtttgttttttcaatgatttcatacggttcaggattacctggtgggatttttctaccgattttatcacaaggagctttaatcggtgccctttatggactcataatggttcaacttggttggttagcaccagtttatgttcccaacttaattatttttgcgatgggtggttactttgccggaatcgggaaggcgccatttacggccattctactagtgaccgagatggtaggttcgctcgtgcacttgatgccattagcaattttatcgttggtggcctacatcgtcgttgacttaatggggggcgcgccaatttacgcatcattattgcaacgcgcacttggcaaaccacatcgtaagttagcaacattctctgatcgcttggaggtaccagtgtttgcgggcgcaccgttagaggatcgccaagtccgtgaagtggactggccaaagacatgtttgttaatcgcgattgttcgtggcgaatccgaactgattccgcatggtgatacgttgatccgtgctggtgacacgttgattgtgttaacggatcatcagctacgggcgacggtgcggcggcaaattgaagacgctgcccaagccttgcgaaatacggatgagaatctcgtgaaataatcgataaaaaagtggtgattaactactttttatgctaaagtattaaaagacagtgtagatagaaaggtagggaattaggttggaaaatcttatcctgaacttattattaatcgattcaatcttgattgtgatcgcagtcatgatgcaaccaagtaaacaacaggatgctttgagtgcgttatcaggtggttctggtgatttatttggcaagcaaaaggcccgtggtttcgaagctttcatgcagaaagtaaccgttgttttaggggctttattcttcgtctttgcattagctttagtgtacttatcatcacactaatacatgtgagacgggtcgaattctaataagaacgttgatgcggtctcctgttgaatggcaggagacctttttaaatgaattcaagcagtaaggactttgggggtgagcgcgtgtcttatcggttgccgcaaccgttttattttgacggtggttcagtcggggttgtgttgttacatgcttatacaggtagtgctaatgatgtccgtatgatgggccgctttttggagaaaaatcagctggcggttagtgcaccacagtttgcagggcatgcaacggctgatccaaccgagattttaacgcgcggttctgtcgatgcatggtgggccgatacggtggctgcgattgagcagttatccgcggctaacaaacaaccgttatttgttttcggattgtcattaggcgggttgtttgccatgcgggcattagaagaactaccacaagtttgtggtggtgggatttttagtgcgccagtactcgaaggaccgactgctaaattgacgccgctctttggccaatatgctaatcgaatcatgcagttaatgggcgtcccagctgcgcaacagacagcacgtttggcgactattaatcagcaattaccacaacaacttgcatcaattgatattttcagtcgacaagttgtggctgacttgaagcaaatcggagataaaccggtcttcatcggccaaggcggacaagatcaagttattgatccaacgcaagcccaagtcttacaccagcaattaacgcaacaaaacataacagttgattatcattggtatccacaagccggccacgtcattacggtcgatagtgcgcatcaccaattagaaacagatgtcctagaatttataaaccgttttaagaaatgagaaagaggtgttgatgtgacacaagttgaacagatgaaagcagcgattcttgcaatttttgaagcagatgcaacgcaacaattaaacgtatccgaaattagtgaacgaatcggcgttgccggttcacaagggttcaaagacctagtgaaagtattagcagaattagaaggggataagacattgaatatggacgatgccggtaagttcagattaccagccagcaaccgccttgttgaaggggtcttccatgctaacgatcgtggctttggcttcgtttcaatcgttgataaggaacctaatgatccagatatctttatcgccccacccaatacgaattttgcgatgaatggtgacacggttgaagtggccatcattaaagaagccgaagaaaacagccgtcgcggtcctgaaggaaaagtggcgaaagtgattacgcgggggattgaagaaatcgtcggcgaattcatgccttattcagatatccaaaaagaaaaaacaggctggattggatacatccaaagtcatgccaaaaaattaagtaattaccgaatttatttaacggataatgggttacatccacaaaagggtgacatggtccaagttgacgttaccggttacccaagtgttgaggcgccaggtcaaatgctggggattgccaaacaagtacttggtaacaagaatgatcccggcgttgacgttttatcaatcgtgtatcaacatgatattaagacggacttcccagaagaagttcggcttcaatcagaagcgattccagatacggttttagaatctgataaactaggtcgtaaagatttaacggatcaagacgttgtgacaattgacggcgacgattctaaagattttgatgatgcagttaacgttaaaaagttggcaaacggcaactactacttaggggtccacattgctgacgtgagttactacgtcactgaaggttcaccattagacgttgaagccttagaacgtgggactagtacttatttaactgatcgcgtgattccaatgttgccattccgcttatcaaacgggatttgctcattaaatccagacgttgaacgccttgctttaacgtgtgaaatggaaatcaatgaacacggcgtggtagtggatcacaagattttcccaagtgtgattaagtcaacagcgcggatgacatacaaaaacgtcaataagatcttaacagatcaagatgctgacttacgggcgcaatacgaacggctcgtgccaatgtttgaaacgatgtcagaattacatgaaattctcttgaagaagcgtcataaccgtggtgcaattgatttcgaagaagacgaagctaagattatcgttgatgaaaatggcaaggccatcgacatcgaattacgccaacgcggtctttcagaacgcatgattgaatcatttatgttggctgctaatgaaacggttgcagaacattacagtactgctaatgcacctttcttataccggattcatgaaacaccagatgctgataagatgaagaatttctttgaatttatcacggcttatgggattcaagcacacggttcaagtaagaaagtgacgccaatgatgctccaagaagtcttgacgcaaattgaaggtcaacctgaacaaccgattattacaacgatgttattaagaagtatgcaacaagcacattattctgatgaatcccttggtcactttggtttgggtgcggaattctacacgcatttcacgtctccaatccgtcgttaccctgatttgatggttcatcgtttgattcatagttatgccacaaatgggatgacgattgaagaaaaagaaaaatgggcacctaagttacaaccaatcgcagaacaaacatcccttgaagaacgtcgctcaatcgatactgaacgggaagtcgttgatcttaagaaggctgaatacatgcttgataaggtcggtaatgaatacgacgctgtgattagttctgttaccagctttgggatgtttatcgcattaccaagcacggttgaaggcctcgtccacatctcacagatgaaagatgactactatagctttgttgaaagccaattagcccttgtcggtgaaagaacgcataagatgttccgcattggccaaccagtacgggtcaaggtcgcgaatgttgatttagatgcccactcagtggactttgaattattagccggtgaagaagtgccattggcttcggctgaaatcttaagcaagattgaagcacgaccaaaacgtccagcacgcccacgtgatcatgaaaaaggcggtcaacgtcgtggtgatcaaaagaaaaacaatcatccaagacgcccagctgcgaacaaggactcacaaaaacgtacttttaaaaagtaggtgattgaatggcaaagaaacatcctcaaaaaccagcaaatttaattgcacagaataaaaaagctggtcacgattataatattttggaaacattcgaagcaggcttagtgctcactggtaccgagattaaatcggtccgtaagggcaaaatcaacttacgtgatgggttcgcccgcgtccgtaaaggagaagcctatctcgaaaatgtccatatcagcccttatgaacaaggcaatcagtttaatcatgacccattgcgcaaccggaagctattgttgcacaagaaggaaattaccaagattggtgctttaacgaagaataaggggattacgattgtgccgttacgggtttatttgaaacacggctttgccaaagttttaatcggcgttggtgaagggaaacgggaatacgataagcgcgaaacactgaaacgaaaagaacaagatcgtgaaatggcccgcgcagttcggattaaaggttagtcctttaattaaaatctaagtataaagtcaaaaagctatcacaaaatttacttttgtggtagctttttctattggaagtatttggtttgtcggcggttacaagtgggtttttattacacaaaaattataaatgtcttcaaactgtaatataacgtcattaatctgcaatcttcttgcggggattgttgcgtataatcaagtctgagttatgaatggaggagtttaacaagatgcgatttagaaaactagcgttagctgttgttacctgtttagttgcaatggttacgatgggcacatctgttagtgctgccagtttgagcgaattacaagcccaagaaagcagtacccaaaaaagtattgatgatacaaattcgaagattcaagccactttaacgagcgtgaatgcgaagtatcaagaaattaatgccttaaaggaaaagattaaggataacgaaaaaaatatcgaacaagcacaaacgcttttgaaaaagcaacaagccactttagcaaaacgtaaaagctatgctaaggaacgcttgcaatcacttcaacgaacagccgatgaccgcaacgttgtcaacgcactattgtcagctgattctttgagtgatttcttcaaccgggcttacacattgacggttcttcaaagtgctgacaaccataatatggatgaattagcacagagttaccgtgatacacaagccattcaagataagttacaagctagcaagacagaacttgatgaacaacgaagcagtttggatcaacaatctgtcgaactggaacaacaagtggctggcttaaagaataatttaagtcaaagccaagcggatcttgcaaaaattgctaaagaaaaagcagaagaacaagcacgtgaagaagctgaagccaaagcggctgaagcagctaaaaaagcggccgacgaagcaacacaagcgccaattgcaccagttgtggacacaaatgcccagcaagccgatttagcaagcgctgctgatggcaaggccggacaagcgattcaagtgcaagcaacggcttattcaactgccgaacctggtttgagccattttggtgcaactggaattgatttaactaaaaacccaaattgtatcgccgttgatcctagtgtcattccattaggctcacttgttttggtacctggttacgggtatgcaattgctggtgacatgggtagcgcgattaaaggtcacattattgatgttcattttccaactgttgcggcatgtaagagttggggtcgtcgtcatattacaatcacaattattaagtaattttaaatacagccttttttgaggctgtattttttacttcgtggattgttttggtaaaataaataataaattatatttaataaaggttgtcagggcaactcataatgaacgttgttgatgattattagtgaaagttagttgaaatatataatttaatactatagactatttatattgctttaaatcgaagtacggttaagattagctgactaagtattatttagatcggctatcttagaacacggaagaattgaagtactgaatagtgtgagtatgaaacttatcgatggttaactattgatactgaaagtttcagcatgtaggaggaatagaaatggatacgagtaataacaccgatttactcggtagcacatcagcagattttatggaattcgcaggtttataccggtggttgattaacaaccttagcgaatcaatgagtcgtgaaagccaaaaatacggtttatctttcgaccaatttttagtgatgcacgagattcaaaatgcgaataatgaaacaactaacagtgcattggcagataagatgcaagtgagtcgttcagcgatttcacgtcaatgtcgttcattacgtaagatggcttttatcgcagaacaatctgatgaaaatgaccaacgcattcgtcgtgttcatttgacggaaaagggtttggaagtttatcgtcatctcttgttctattacgtagacttgtacaaagatttacaaaatgaaatcggccaagatactgttggcgcaacaatcgaccaaagcaaaaaaatctttggtcgcatggcatcaatgaacatggatcgcccagaagcaaaataaacgttaaaaaaggccacaaccatttgttgcggcctttttttgtgcgacggatttacaattcaagtgcaacaaattagtcaaatagaaaagactcatagcctgagtccttgtaaaatggaatcaccacaagaccaactacaaggagaactcgactatgagtccgtacacccatcttaccttaaaagaccgtgaatcgatactgcttggtatctctacaggcaaaactcttgataccatcgccaaagagataggtcgttccaagagtacagtcagccgtgaaattgcacgtaacggcggctggcggagctattcggcagccaccgctcaggaccgctaccggcgggttcgcttggctagcaggcgtcctcggatcctcgatcgaccggggactcgtgacgctgtcattcgatatatcacggtgctacattggtcgcctgagcagattgccggtcgcttgtcactagaaggcagtcctattcgcatcagctattcgactatctacagaggtatctacctagataatctcggcgttccattgaagagccatggtgctcgcgggctaccaaggctgcttcgacaccgaggcaagacgcgcaaaatcaaaggcaccataaatgaacgccgggggcgcttcaatgacgtgccatcaattcacgaccgaccccggtcggcagaaaatcgcagctggtttggtcactgggaaggcgatacagtacgcggtaaaacaggacactctgcattagtaacattagttgaccgtaaatcacgctatctgctttcgaagcgaacggccaacgcaaaagctgacactgttagagacgtcatgattgagctgcttggtgccttaccagctaaccgagtaagaacagtgactcctgaccgtggaagggagtttgcccggtacagggagctggcagaacgtctgaatacaaaggtcttctttcctgacccacacgcgcctcaacaacgaggaactaacgaaaacaccaacggactgattagagaatactttcccaagaacacagacctagaccttcagagcgaccaggaaattgagacttacattgaacaactgaataatcgaccacgcaaggtcttaggctggaagacgccatcagaagtcttcatgggtaaaaagttgcacttaagttgacaattcgtcgcgattagcaacggtcgcgcataatgacgcgcgtcactttctttgttagaatagagctagtcactttacgaatgtaggaggaacaacatgggttctcaaaaaaaattattattagtcgacggcaatagtgttgcatttcgtgctttttttgcaatgcaccaagctttagaccatttcaccaatcaggcaggactgcacactaatgcgatttatgctttcaagaatatgttggatattattctgaaaaagattgaaccaacacacgtgttagttgcttttgatgcgggcaaaaccacttttagaaccgaacaatttgccgactacaaagggggccgttcaaaaacgccacctgaattaacggaacaatttccttatattagagaactcttaacagcatatggtattcagtcttatgaactcgctaatttcgaagcggacgatatcattggtacacttgctaaacaagcagaagctgatggtttcacggtcgatatcgtcactggtgatcgcgatttaactcaattgacgactagtcagacaaccgttaacatcactgttaaaggggtcaatgaaattgaagcgtatacccctgaacacgttcaagaaaaactcggtttagaaccaagccaaattatcgatttaaaaggattgatgggcgatacctctgataattatcccggggtgacaaaggtcggggaaaagactgcgcttaaattgattacggaatttggaaacattgaaggtgtctatgaacatgtcgatgaaatgaaaaagagtaaattgaaagaacatttgattgaagatcgcgacctagctttcacgagtaagacactggcaaccattaaacgtgacgcgccaattacgattggcttagacgatgtggtgtacaacggacctgatatggcagctttggttgctttttaccaagaaatgaacttcaagtcgtttctaaatcaattagatgttgcaccagttgaacccacggctactgaagactatcaatttacagtattaacccttgataacatcgccgatgtcgtgacaaccactgaaaacgttgcgtttggcatcgaaatgttaaccgacaattaccatacagcagacttgattggcttttacattggccgaccagaccactggtatgtcagcgacgacgcaacactcttgacagaatcggttttaaaaacgtggttagaagatgctaaacgtccgaaagcagtttttgacgtgaaacgcaatcaggttgcggtgaatcgcttagggattcacttagcgggggttcaatttgacttactattagcgtcttatttgttgaatacaacgaataacagtaatgatcttggaacggttgcaaatttacatcagtatcaaaatgtccaaacagatgaagctgtttatggcaagggggctaaacgcgcagcccctgtcgatccaaccgtgctttatcaacatctgattcaaaaagcagcagctatttacaaattagcaccacaattgacagaacaattaaaaaaacatcaacaattcgatttattcacggatatggaattgccattagcgctagttttagcggatatggaaatcaccgggattcgagttgatgcaagtcgcctacaacaaatggggggcgagttcagtcaaacgctgaagattttggaagaaaagatttatgcggaagctggcgaaacgtttaacatcaattcgcctaagcaactgggcgtcattctattcgaaaagatggggttaccagtgattaagaagaccaagaccggctattcaacggcggtggatgtcttggaacaacttaaaaaagacgcaccaattgtccaaaccatcttggattatcgccaaatcgctaagattcagtcaacgtatgtcgaaggattattgaagtcaattcatcaagataataaggtgcatacgcgttacttgcaaaccttaacgcagactggtcgcttgtcatcggttgatcccaacttacaaaatattccagtccgtctagcggaaggccgtaagattcgccaagcgtttgttccaagtcaaccgggttggcagatgtttgcttctgattactcccaaattgaattacgagttttagcccacatttcgggggatgccaatatgcaagaggcattcaaggaagaccgcgatatccatgcgaatactgcgatgaagatttttggcttatcgagcgctgatgaagtgacaccagatatgcggcgccaagcgaaagcaactaatttcgggattgtttacgggattagtgactatggcttatcacaaaatattgggatcacaagggctgaagctaaacgctttattgaagcgtattttgaacagtatccaggtgttcatcaattcatgcaagatatcgtgaagaaggcgcgcgaagaaggctacgttgaaacgctcttccatcggcgtcgctatttaccagatattcacgctaaaaacttcaatttgcgctcatttgcagaacgcacggcaatgaataccccaattcaagggagtgccgctgatattattaagatggcaatgatcttgatgcaagcggaactgaagaaggcaggattacaagccaagatgcttttacaagtacatgatgaattgatttttgaagcaccagaatcagaaataccaatgttagaaaaattagtaccaaatgtcatggattctgcggtttcattagcggtgcctctgaaagttgaaagtggctttggaccaacttggtacgatattaagaaataaggggacacacaatgccagaattaccagaagttgaaaatgtgcgccgcggattggaacaattagtggtcggtaagacggttcaagcaattgagattcgctggtcgaaaattatcagtaatccagacgatgtttttgttgaaggtcttgttggacgccaaattatcggtgttgatcgacgcggtaagtatttattgattcgtttcgatcaaaacttaactgttgtgagtcatttgcggatggaaggcaaatacgaagttgatgatcaatccgtaccaatgactaagcacacgcatgtgatttggacatttacagatggacaacagttacgttatcttgattcacgtaagtttggccgaatgttattaattgaaacgggtcaagaaaacactgtttctggattgaaggacttaggggttgaaccaaccccaacaacgtttaagaaaaccgccttctatcaggcgttacagaaacataaaaaagcgattaaaccactgttgctggatcaaaaaattgtaacgggccttgggaatatctatgtggacgaaacgttgtggttgagccagattcacccagaaacaccggcgaatttattgacgaaagctgaaacagatcgtttgcatgatgaaatcatcacagagttagaactggcaaccaataacggtgggacaacagtcaatacgttcttaaacgcggcgggtcacgctggggcctttcaggatatgttgcacgtctatggtaagaaagggcaaccgtgtgatcggtgccagactccgattgagaaaattaaagtagcacagcgtggcacgcatttctgtccgcggtgtcagattaagagagaagcggttcaatgacgtattttctaggtttaacgggtggcattgccagtgggaagtcgactgttgcggcattgtttaaagaacagggaatcccggtgattgatgctgatcaagttgctcatcaggtattagcgactaataaatcggtacagacacaattgcaagcagcctttggcgaagcagttgtcaaaaatggtcaagttgatcggcctatgttgggccagcaagtcttcggtaacccagaggctttgactcagttaaatgcgattactgggcccgctattttgacagccattaaacaacagatgcaagcagcagatgcaccgctggttgtgttggatgtgccactgttatatgaacaacactacgagcaatattgcgatggtgttgcagttgtctacgttgaacgtaaaacacaattgcaacgtttgatggcgcgtaaccaattgactatagaacaggcaaatgcgcgaattgatagtcaaagtgatttggcgaccaaaaaagcgcgagcggatttcgtgattgataatcaaggcacacctgcaatgttgcggcaacgtgttttggcgttgttacaacagttgtgtcataacaagtaatacaagcggtcgaacagattattctgttcgaccgcttttttgtttggaaaaggcgaaatgccttgagactgatacattttttgtttagcctgcttgcctggcatgttatactactgttatactaattgttttaaaattggattgaatttgaaacgaattaatcaaaagataagaaggtgtcattatgctatgtccacattgtcatcagaatagttcgcgggtaattgatagtcgtcccacggatgaagggcgagtgattcgtcgtcgccgtgagtgtgagaattgtcgtttccggtttacaacgttcgaacgagtggaacaaaccccattgttggtaatcaagaaaaacggaacgcgcgaagaattcaaccgtgataaattattgcgcgggctaattcgtgctgctgaaaaacgccccgttacaatggagcaaatgactgaagtagttgatgaagttgagaataagattcgctcattgggtgaaaacgaagtctcttcacaagccgtcggagaatacgtgatgcgcttgttaccagatattgatcagattgcctacattcgctttgccagtgtttatcgcgaattcaaggatatgaatgtctttatgagtgaattacaagaaatgatgaataaagaaaagacgaagaaatcgaattaaggaagaggggttagccgatgtcagatgcatttgattttttgagtccaaaagacggcttttcagtgacaaaagctaactatttgaccgatttcgatcaaacagtcgtcacttacttatatcaaccattgatgggggctgttgcttacagtctctatcttttgttatggagtcaaaccaagaaagaaacggaacaacattttcaaacacatgcgactttgttaaatctgttgagtgttgatttacctgctttttatgacagccgcagcaaattggaagcacttggtttaatgcggacgtatcaaaaaaatgagggaactggccgcaagttggtgtatgaactgtatgcgccattgcaaccacaagctttttttaacgatgatttgttaagtgtggcattgttcgaagcggtccgcgaaacacggtttgtggaactccgtgactatttcaagctacgaccggtttacgccaaggattatcaagaggtcactaagaatttcttgaccgttttccatgtgcaaaacgatttattgacgaccgcgccaagcagtgtggctgaaactaaggcaatgtatcaacaaaaagcagctagcacaccgcagtttacctcggttgagttgcggacttttgattgggacctattacaagatgtaacggcgcaataccagattgatacggatcaaattctcaaaaatgaacagggcttgtttaatctccattatttctatggtctagatgagatggacttagcgcgtttgattggcttgacgatgaatgttgctgacagtacgattaatatggcagcgctcgaacagaacgtcttgaacaattacacacgacgtcagagtaaccggcaaacgccagctgctacaacaacgcaaaaaccgttagccgagttacaaaaagaatggcaaaaagccggctttaacgaacaggaattgcagtggctaacagaaagtcagggctacttgccagttgattatctcgaatacttgaaacaaaagaaccacggctttgtcgctaaaaatgaaatccgggcgttaaaggacttgcaaaaccgctatatctttaacaatgatgtgctcaatattttggtcgtttatatcattacgcaatatgatgggctcactcaggcgctagtcgatcggattgcgaaccagtgggctcaacaaggggttaagacggcagcggatgcgattttgcagattcgcgatttccaaaccaaacagacggcaaaggtgcaaaacaatcgccaaacgcgttatcagaacaaaactaaaaaagaaccagtacctaaatgggctaaaccagattatcaagcgccaaaagaaacaaccacacctgagcatcagcatgaactagaagtggcgttgaaaaaaattcgtgaggggcgggaatcgtaatggaaaatatgggtaaagatttgacggattacatgaatcggcaaaagttaaaccaacagtttaataaattggtcgaagatgccttgaacgattccgatgtccaagcatttatacaagctaacaaagaccgcttatcacaagaaacggtcacgcgtagtgccgctaaaatttacgaatacgtcatcgaaaagaagaagttagctaatgggcaaaccactttggcaccgggttatgcgccaaagttagtcttaaataaccattttatcgatgtcagttatgagcctacggcaagtttattacaagagcgcgaacaagctgccttgcatgcacgagtgaagtcaattaatatgccgcgcgatattgaacaggccaagattgattcatacgatccaaccaatcggtttgacgcattgatcaaagctaccgcgtttatcggggcttatcggcaagcaccccatgattttcaccaagccttgtaccttagcgggcaattcggggttggcaagacttacttgttaggtgcgattgccaacgaactggcgttatccgggtttgaaaccacgttgattcatttcccgacattttcagtggagatgaagaatgcaattgggcaaaacaatgtgttagaaaaggttaacgtgataaaaaaagcaccgattctgatgattgatgatatcggtgctgatgcaatgagtgcgtgggttcgggatgaagtacttggcattattttgcaatatcgaatgcaagaacaactcgccaccttcttcagttcaaacttcacaatgactgaattagagacgcatttgacaactagcaaccaaggagacgaaccggttaaagcggcccgcatcatgcaacgtgtgcgctatttagcgcaagaaattgaagttggtggtcaaaatcgccgcttacaaccttagtaatttaggcttgctaaaaaagcaattaagtgttttaatagaatcaatcaatgatgaaagacaccttttaaatgaaccatcgcagagagaaaaacatagctgaaagtttttcacccccatttaattgaccactttcaaaggcaatacaactgatcgggtcgtttccgttatagacgcttaaagttggagaaccaaatgttggggtctcaatctgggtggaaccgcgaaattaattcgtccctgagctgcacaattcgtgcgtctcagggactttttttattgttgatgacaaattagaaggagtgaatagtaatggcagagattcaattaacttttccagatggtgcccaaaaggcatttgaacaagcaacaagtcttttagatgttgctaaatcaattagtacaagcttagctaaaaaggcaattgccggtaaattgaacggtgaattagttgatttacagcaaccaattttagaagatggggcaattgaaatcatcactaaagacgacaaagcaaccgatttgatggcaatttggaatacggcagcctttgttttagctgcaacgttgaaccgtgcttatcccgagatgcaattcggcgaagtacatgcaactgaagatggcttcttctatgataccgaaaacgaagctggtcaagtagctgtgaccgacttaccagacattaaaaaagcaatgagcaagttaatccaagctggcggggcaatcgaacgtgtcagcttagacaaagctgctgctaaaacactatttgctgggcaaacttacaaattagcattattagatgaaatggaaacagaccaagtcttagtttacaaattaggcgattttgctgattttgggttagcaccaatgctagctaaagtgagcgacgttaaggtctttgaactcttatcggttgccggcgcttattggcaaggtaaatcaagtaataagatgttacaacggatttacggaacagcttacaacaaacaagctgacttagatgctgacttacagcgtcgtcaagaagctaaagaacgtgatcaccgtgtgattgggaaccaattagacttattctttgttgatcctaaggttggtgcgggcttgccttattggttgccaaatggtgctaccatccgacgttcaatcgaacggtacatcattgataaagaagttgccaatggttatgaacatgtttacacaccaattctagcgaacttagatttgtacaaacaatcaggtcactgggatcactaccgtgaggacatgttcccaccaatggatatgggcgatggcgaaatgcttgaattacgcccaatgaactgcccatcacatatccaagtttacaaacaccacccacgttcatatcgtgaattaccaattcggttagctgaactagggatgatgcaccgctatgaaaaatcaggtgcgctttcagggttacaacgggtgcgtgaaatgactttaaatgatggacatacattcgttcgtcctgaccaaattcaagatgaattcaagtcaattttgaaattaatgattgaagtgtactcagacttcaatatcaacgattatacattccgtttgagctaccgcgatcctgctaataccgaaaagtactatgctgatgatgaaatgtggaacaaagcacaaacgatgttaaaaggtgctatggatgatcttggtttagattacgttgaagctgaaggcgaagctgctttctacggtcctaagttggatgttcaaacgaagacagctatgggcaatgaagaaacactttcaacaatccaattagacttcatgttgccagaacggtttgaattacaatatgttggcgaagatggcgaaatgcaccgtccagttatgattcaccgtggtttagtatcaacgatggaacgtttcacagcttacttaacagaaatctacaagggcgctttcccaacatggttagcaccaactcaagctgtgattattcccgttaagaatgaattacattatgattatgcaaagaacgtcaaagatgcgatgatcaaacatggtttacgtgtgcgcattgatgatcgtaatgaaaagatgggttataagattcgtgaagcccaaacaagcaagattccttatacattagttgttggggatcaagaagttgctgacgcaacggtttctgtccgtaaatacggtgaagaaaacgctgctgaagaagcttcagacatgtttgtagatgcaatcgttgctgaagttggtaactacagtcgcgatggtaaagatcacaaaacaatcaacctataagcggttattaaaacgtccgaaatgttattttgacatttcggacgtttttttgtttttttaattgcgcacaactaaaaaagcggtataataaatatgtaaacggttccaatcgttgattaatgggaggcgttattatgacgacagaaaaatatcaagcaggttcagcagagcaaccattggacattattaacctctatgacttggaaaaagaagccggcgaagttgttcccaagggtggctttgggtatatttacagtggcgcgggtgatctttataccattaacgaaaatattacggcatttaatcacaaatacatcgcaccacgggttttacaagatatcgaaaatccagatacaactaccgaaatctttggcgatcacttaacatcaccaatcattatggcacctgttgcagctcataagttagtgaatactaaaggggaagcggcaaccgctaaaggtgtggctgattacggttcaatcttaaccatgagttcatttgcgtcagcaagtatcgatgatatggcaaccgcagcagatggcgcaccgcaatggttccaactctatatgagtaaggataacgatatcaatcgtaagattttagatgaagcgatggcgcataacgttaaagcgattgtcttaacagctgatgccacagttggtggtaaccgcgaaaccgataaacgcaatcattttacattcccagtcgggttaccaatcgttgaagcttaccaaacaggtgtgggccaaacaatggatgccgtctacaaatcagctaaacaacgtttgaaccctaaagatgttgaattcatttctgaatacacacatttaccagtctttgttaaagggattcaaacagcagaagacgttgaaattgcacttcaagccggtgctaaagggatttgggtatccaaccacggtggtcgtcaattagacggtggccctgcagcctttgattcattacacgtcgttgctaaggcagttaataaacgggtaccaatcgtctttgatagtggtgtgcgtcgtggtcaacacgtctttaaagcattggctgaaggggcagacatcgttgcaatcgggcgcccagtcatttacggattagcacttggcggtgcacaaggggtacaaagtgtctttaactacttgcaaaaagaattagaattagtcatgcaattagctggtacacacaacattgacgaagtaaaagccacgcacttagtggacaatcattacggcaactaagtacacgtaaatttaaatgcgggatttccttgactttaaattcctaaccgagtatacttattttcgttgagaaataaagcagaagttcccgcttctcgccttagtagacacttgatgtctctgggctgatagtttctaattcggacgaactaagtaaccgaacaagcgggcctttctgttatgagagggccgctttttttattacttagctgcattttctctctaaactttatggaggtgaagagtcatagcaaaagatttgatggttaacgatggtattcgtgcacgagaattgcgtttgattgctcaagatggcgaacaacttggtattaagagtactcaagatgcaattgcattagctgatcaagctaatatggatgttgttttggtttcaccaaacgcaaaaccacccgttgctcgtattatggactatggtaagtaccgtttcgagcttcaaaagaaacaacgtgacgctcgtaagaagcagaaaaccattaacctcaaagaggttcgtcttagtcccacaattgaacaaaatgattttaatactaagttgaacaatgcacgtaagttccttggcaaaggcgataaagtgaaagcttctattcgtttcaaggggcgcgcaattacgcataaagaaattgggcaacgtgtattggaaagacttgctaaagaaacagaggacatcgctaaagttacagcacgtcctaaaatggatggccgtagcatgttcttaatgttagaaccgctaaaggaccaaaaataaaaaatctgtttctgatttattaggaggaaatatcatgccaaaatttaagacacaccgtgcttcagcaaaacgttttaaacgtacaggtaatggcggcctaaaacgcagccacgcctacacaagtcaccgtttccacggcaagactaagaaacaacgtcgtcaattaagaaaatctggaatggtttcaaatagcgatatgagacgtatccgtcaaatgttatcaggccttaaataagccatagcattttcggattcaagcaaaaattagatcagtacagcaacgctttgacgttgtttgttattcaaggaggaaattcttatgccacgtgttaaaggtggaacagtgacgcgcaaacgtcgtaaaaagattttaaaattagccaagggttatcgcggcgctaaacatttattattcaaatcagcaaatactcaagtaatggtttcataccgttatgcattccgtgatcgtcgtcaacgtaaacgtgacttccgtaagttatggattgctcgtatcaatgctgctgctcgtatgaacaacatctcatacagccaattaatgcacggtttaagagtcgctgaaatcgacatgaaccgtaagatgttagctgacttagctgttaacgatgctgctgcatttacatcagttgttgaagctgctaaagctgcattaaacaaataattaaagatcaaaaaaagagtctgggacaaaacttcgttttgttctagactctttcttttatcattataaaattagtggctaataacaatcttacctggggcatgatgactctcaaggagcttgtgaccttcaataatgccttccaaagtaaatgggagcgtcttgaagacggtattgtgtagtaaaccttgatcgatcaattcatttaaatcttgtaaggcggttaaatctgcataatccttacgcggatagacagattggtaattgatgtcagcgcgttgttgatcgtctgttggtaagatggtcgttgaagtgaatgtgccacctggtgcaactaagttattgaggcgttcagttgattctggatcgcgacttaagttgataccgattttagcggtctgcgcaagtcgttcgaagtcagatggctgatcataagcaattacttcttggacaccgaatgagcgcagatagtctaggttagcactattggcaattgcaatcacgtttaaatgagctgctaagcttaattgaacgagtaaactaccaacggcaccactggcacccataatagcgattgtatcgccgtgtttaaagtttgtgaagtgcatcagcgtattgtaagcagtgatgccggcactgggtaaaccggctgcttcagcgatactcatgctggctggcttacggagaatcttcgcagtactagccgttacgtattcgctataagcacccattgatcggtgattgatgacgatttcgccaacgcggtaatcatcgacgtcagcaccaagttcaacgatttcaccaaccacatctgtaccaggaaagattgggaagggtaatgggcgcactgaatcttgtgaaccattccgtagtgcaacatcgtatggattcaatccagcagcgagcactttaatgaggacttggttgtcctttggagttggttgaggctgatcgaaacgttcgaaaacgtcagggccgccaaagtgattaaaaccgaatttttccataacaaacacatcctctcaatttctttaaacgtaccagagttggggctaaaagtcgattagtttgacttatggatttaaatggattaggaattagttggaaattatggaaattaaccgcgtaaaggtgcaatttggtgtcaaataccctataattaatcagtgactagattaaaaagaagtgcgtcagtaggcggttatatttcgaggactagcctagtctggcgaatgaccaacttgttggtcgtttgacggacgtcgctagccgcaaaaatatgcctactgaggcacgttagaaaagaagtgcgttcaaacctggtatactccgagcactagcctaacaaggcgaatgattgctgcaagtaatcgtttgacttgtgtcgctaggcacaggaatatggtttgaaaagcacgttaaagaaaagaagtgcgtcatccacggttagcttccgagcatttgcctaacttagcgaattggcgctgcaagcgccgatttgataagtgtagcaaagcgcaagaagctgttgatgaaagcacattaaagtcgaggggacagtacatgctaaagaatttcaagccaacttggatggtcaatgccatctacgacttaacaccagaacaacttaaggcaaaagggattaaggccgttttaacggatttagataatacgttaattgcgtggaataaccccgatggcacaccacagttaaaagcttggttagcacagatgcaagctgccgaaatcaccgtgatggttgtttcaaataacaaccatgatcgcgtgcaacgcgcgctcagtgaattgcaattaccattcattgctcgggcgaacaagccattggcaactgggattaccaaagcgaagaagcagcttggcctttcgcgacatgaagtggtgatggtcggcgatcaattgattaccgatatgcatgccggtaatgtggctggcgtccggacgatattggtcaaacccattattgacagtgatgcctggaatacatcgattaatcgattctttgaaaaatatattatgcaacaactactaaaaaaacacgcagatttaacttggcgggaggatttaaatgactgaaacacaacaaactgaggaagaactattttgtattggctgtggcgctcgcatccaaacaacggacaaagaagcactcggctatacgcctaattcagcgcttaaaaaaggcttggaaacgggtcaattgtattgccaacgttgttttagattacgacactacaacgaaatcagtgatatcaaattaaatgatgatgatttcttagccttattgaaccaaattggcgacagtgacgcgttgatcgtgaacgtcgtcgatatcttcgattttaacgggagtttaattccagggttacatcgttttatcggcgataaccccgtgattttagtggggaataaggttgatatcttaccatctgctcttaacccaaataaagtgatcaattggattcaaaaagaagcgaaagaacatggcttacatccggttgaaacgatgttggtcagtgctaaaaaagggaattcagttgatgaattattggccgtgattgaacgcgaacgtaaaggccgcgatgtctatgttgttggggtgacgaacgttggtaaatcaacgttgattaaccgcattatcaagcaaactgggattttagatagcgacgtgattacgacgtcacaattcccaggaacgactttagatcgcatcgatattccattgtatgaagatgatcatgcattgattgatacaccagggattatgcatgcccaacaaatggcgcattatttacatgataaagacttacggttgattgcgccgcaaaagcggattaaaccaaaagtataccaattaaatgaacaacaaacattgttcttgggtgggttagctcgttttgatttcattcaaggtgcacggcatggctttgtcggttattttgacaatgaactttacattcaccggactaaacttgaaaatgcagatcaattctacgctaagcaattaggggacatgctacagccaccacatccagaagatttagctgattttccagaactccaacggtatgaattctcaacaaagcaaaagagtgatttagtgtttgctgggttaggctggattacgttaccagaaaatgtcgtggttgcgggatatgcgcctaaaggtgtctcagtcatgattcggaaagcattaatttaattagggaaggaagtatcgcacgtgttaacaggcaaacaaaaacattacttacgcggtttagcgcaaaccactaaaccactttttcaactaggcaaaaacggcttaagccaaacttatttcgaacaaattgaagaggccatcgaaaaacgagaactcgttaagattaacttgttacaaacaacagaagtgaccgttgatgaattagccaacttcttaaaacaacatgacagtcgcatcgaaattgcgcaaaaaattggacgcacattggtgatttataaagcttcacggaaagaaaaataccaaaagatttcaacgattgttactaagctcggacgctaataaggcggtgatcagatgcaaagtgcaacgctaaagcagacaaatcatgtgactgaaccggacgtgttggttgtagaagatggccatcgcttgcaagtcggcattatggggggcacatttaacccgccacacatcggtcatttagtgatggcagaacaagttcgtagccaactcggtctcgataaaattttgtttatgccagatgccaatccaccgcacgttgatgagaaaaaaacattaccagcaaaacaccgtgttgcaatggtagaacgtgccatcgctgacaattcgcattttgaactcgatttaacggagattgaacgtggcggtgtcagttacacctacgatacgatcgtggcattaaaacaacaacaccctgaaatcgattattatttcatcattggcggtgatatggtcgactacttgcctacttggtatcgaattgatgatttagtgcagttagtccaatttgttggtgttaaacgaacagggtatgctcaacaaacgccgtatccagtcttatgggtggacgcaccggtaattgatgtcagttcaacgcaaattcgcaataagattcaacaaggctgttcagtgcggtacttgttaccggacccagtctttgaatacattcaaaaagagggcctctatcatgagtgattttgtttatcaagaaaacatcgtgccgtatacacgggctgagttagtggctaaagttgccgctaacttatctgaaagccgatttgaacattgtttgcgtgtggaagccaccgcgattcaattagcacaaaaaaatggcgcagatgttgaacgcgcggcaattgctggtttagtgcatgactatgctaagcaattaccagatgaaacgttcattgaagcgattaaaacgcaaggctttgatccagaactactcaattacggtaatgccatctggcacggtgttgttggtgcttatttcattgaacgtgatttagaaatccatgatgaaacgattttaaatgctgtgcgtcgtcatacgattggtgcgccagaaatgaccttgattgatcagattttatttgtggcggattttgtcgaacctgggcgcaattttccgggcgcagaagctgctcgtgagacagcaatggctgatttagcagccggcgtgcggtatgaaatcttaaatacattgacctttttaattcagggcaagaagcagatttatccgaaaacaatcgacacatacaatgcttgggtaccgactcaagccaaataaaggagaactttagtgaaaagtttagatattttaaaaattgctgtgcaagcagctgatagcaaacgagcagaagacatcgtcgcaatgaacatggaaggcatcagtttattagctgattacttcgtgatgttaactgggacgtcagaacgtcaattaggcgcaattattgacgccattgaagacgcagaagaagaaaatggcgttttcgtaaaacacatcgaaggtaaaaagggttcacgttggatcttgatggactttggcgatatcgttgtcaatgccttcatgccagaagaacgtgccttatacaaccttgaaaaactttgggatcaagcaccacttgttgatgtttccgaatggttggatgaagaatgatttaccaaagctttgcaaccgtctatgaccgtttgatggaccattcattatatggtcaatggcgggattacacgttgcagacgttacaaaataaacatcgagtcctagaactagcttgtggggctggtgatttagccatcttgctaaaacaagcagggctagaggttgtcggcttagatttatcggccgagatgttgagtatcgcttctgaaaaggcttctgaagccgaggtcgagttacctttattacaaggcgacatgcttgacttaggcgaaattgggacgtttgaagcggtcacttgttttgacgactcgatctgttacatgccagatttagcgcatgtccaacaagtttttgaacaagtttatcgaaatttagagccaggtggtcaatttctatttgatgcccattcactttatcaaatggatgagcttttcccaggttttatgtataacgataagacggcagaaacggccttcatgtggacgagttacgcaggtgaagtaccacattcagttgaacatgatctcagcttttttatctgggatgacgagattgacggttatcaagaacttaatgaattacaccatgaacgaacttatccggtggtagattatgttgcagcattagaagctgctgggttcaagaatgtatcagtcagtgctgattttggccaagaagccgttcaagaagatagtgtgcgttggttctttagcgcagtgaaataggcggaggacgcatgagaattacggggattattgcggaatataatccgctacataatggacatcggtatcaattgcaacaggcgcgggtagcttcgcacgcagatttagtgattgtctgcatgagcggtaactatgtgcaaagaggtgaacccgcgattttggacaaatggacgcgcgcacaacttgctttgagcaatggtgctgatatggtcgttgaattgccgtttgccagtgctgtccaacctgcagaccgttttgctgatggggccgtcaagttattggcggcgcttggttgtcagaccttagcgtttggcagtgaatatccaacgtttgactatcagcaagtcgggcaacagattttagctttaaaggccaagtcacagacgtttattgattatcaaaaaacttatgcgacgcagctcaatgagttttatcaagcagaattaaatttaaatttagatcaacccaatcacctcttaggggtcagttatgcggttgccaacgcgcaacttgaagtgccaatgcagttgcttgcgattaagcgtgagcaggcacaacacggcgatcaaacgattggcgcgggacaatttgctagtgccagtgctatccgacaggcggcaacaaagggtgatgactgggcacagttagccccagtgatgccgcattcgactttaacagcgctccagactcaatcgcatctggattgggaccaactatggccgctattgaaataccgaattgaaagtacaccccttgcccaacttcggcagatttatcagatgtcagagggcttggagtaccgtttcaaaaaggtgattcattcagtcaatcggtatgccgagttgttacaggcacttaaaacaaagcgatatacgtatgcacgcttgcaacgggtttgtttatacgtcctgttgaatattcaacaaacggatattgaacaatcattagcgcagcggcccatccatttgcttggctttaaccaagtcggccaggcgcatttgcacacgttgaaaaaaacgctcgatcaaccacttatcagtaaggtctcagctaaattgggtaccgaagagggcccactggggttagaggtgcgagttgatcgattacaagaacagtttggctggcaatcacagaattttgcccgccaaccgatttttaaccaaagaaaggatgacgagcattgttaaaatggacagtccaatcattattaaaacatcgtgatcatccattgatgtttaaagaaacattgatgttaaaagaaagtttacaaaaaagagaagctgatgtcctagatgctacaccatttgtagtagacggtggattaacggttgaccagcgcgctgtaattgcacgcgtacatgtggtcgggacattaacagtgccatcaacgcggagtttagatccagtagccttgccaatggattttgaattcactgaaatctacgttgatccagaagacgagcagttgggacgatttacggacgaagatattttgttcccaatcgaaggcgaagccctagagctacaggtagctgttgaagatcacattctcttgcacattccaagtcacatcctaacaccagaagaagaacaagatgatgtgatgccagccggacagtcgtggtcagtcatttctgaagaagcctatgctaagcaacaggctgaagaagaaacggcacccaatcctgaatttgctaagcttaaacaattattagaagaacaaaacaatgacgccgactaagtttggcgtttttttatacccaatttgttaaatggaccggaccaaatcagttaaaatgcttttatttaaagcgtaattctgctaacataaacacagtagacgcgttgtcgttttgatagtcaacaacgcttaaatttagaaatcatttaggaggccttttacatgagtcaaccacaaatcggtgtcatcgggatggcagttatgggcaagaacttagcattaaacattgaaagtcgcggttacaccgttgcgatttataaccgaacaggtgctaagacagaagcagtgatgcaagatcacagcgaaaagaaattggtaccaagctatacaattgaagaatttgttcaatcattagaaaaaccacggcgaatcatcttaatggttaaagccggcgctggtacagatgctgtcatcaacgaattgttacctttattagataaaggtgatattttaatcgatggcgggaacaccttctttggcgatacaattcgtcggaatgctgaactagataagtcaggcattaactttatcggaatgggtgtttctggtggtgaattaggcgcattagaaggcccttcaatgatgccaggcggtcaaaaagaagcttatgaattagttgcaccaatcttagaacaaatgtcagcaaaggctgaagatggccaaccatgtgtcacatacatcgggccaaacggtgctggtcactatgttaagatggtccacaacgggatcgaatatggtgatatggaactcatctcagaaagttataatttattgagaaacgttgttggtttatctgttgaagaaatcgctgatgtcttcaaagaatggaaccacggcgaattagacagttatttaatggaaatcacagcggacatcttaacgcgaaaagatgatttagaaacggataaaccaattgtcgacgtcatcttagattctgctggtaacaaaggaactggtaagtggagttcacaaagcgcccttgaattgggtgtgccacaatcattgattacagaatctgtttatgcacgttatatttcagcaatgaaagacgaacgggtggctgcaagcaagattttaccagccccaaccgttgctaaattaacagaagataaaaaagaattaatcgaaaagattcgccaagcattgtacttcagcaagatcatgagctatgcgcaaggctttgaacaaatgcgggttgcttcagatcaatatgactggtcattaaactatggcgaaatcgctaagatctggcgtgaaggctgtatcattcgggcccgtttcttacaaaagattacggatgcctttgataaaaaagctgatttaaacaacttattgttggatgattacttcttagatattacaaagaattatcaaggcgctgttcgtgacgtagctgcaatggccatccaacaaggtgtgccagcacctggtttctcagctgctatcacatattttgattcatatcgttcagaagtattaccagcaaacttaatccaagcacaacgcgactactttggtgcgcacacataccaaagaacagaccgcgaaggcacattccattatacttggtataaagaacaatagagtgcgcaagtagacggggatgcgctgaggattagtggaatatcgtaaatgagcggtgaaaccgatcgtttgcggtatgcaactaaccggaagcggatgtctactggagcacgttttagtacaagagtgctgactattgcatttagtcattgagcattaataaaaaattgccattaatcccggttttaggattaatggcaattttagattaagcggaaatggctgcgacgggatgcgcgttttaaaatagagtgatgagtcgaacgtttttggctttaaggattaacagaaaaatgatgcttatggcggttcttagccataagcatcattttacggttaaccggaaaagacagttcgaggaagcacgtttctctaaacacccgagccgattattaaggcgcaggtgttttttcgattattactaaatcgccatcagatgagagtcagattagttagttatttaattggaactatgctagaatggaaaggtaagccgattttggcgcttgatgtttcttagagaattcttatcattgattagaatttagagagtccattaaaaattcttttttggggagtgactaaatgagtcgcatattgattattgaagatgagaaaaatttagctcgatttgtggaacttgaattaaagcatgagggttatgagacagaggtccatttcaatgggcgtactggtttagaagctgccttgaatgaagaatgggacgcgattttattagacttgatgttacctgaattaaacgggttagaagtctgccgtcgggtccgccaagttaagaatacgccaatcattatgatgacggctcgtgattcagtgattgaccgtgtttctgggttagatcatggcgcagacgattatatcgttaagccttttgccattgaagaattattagcgcgtttacgggcattgctacggcgaattgatatcgaaggcgaacataacgctgctaaacaaacgacggttacttaccgtgatttaacggttgaaaaagaaaaccgagttgttcggcgtggtgatgatgtgattgaactaacgaaacgtgaatatgaattattattaacattgatggaaaacgtcaacgttgttttggcacgcgatgtcttactcagcaaagtttggggttacgattcggatgttgaaaccaatgttgtcgatgtttatatccgttacttacgaaataaaattgatcgttctggcgaacaaagttacattcaaacggttcgtggaatgggttatgtgatgcgctcgtgatgcaggacgaaacggtagcatcaacaacaaataagggtcgtaaaatatcgttaaaggtcaaatgggcagctgcggttgggttggccatttttatcacctttgcgattttttcaattgtgatctttagtagtatctctaatatcttgctacacagagaagtcgacaatgtgcacgatacggtgaccgtcgtacaagcgagattgtccagcaatgggccacatcttacagaaggctttgtcaccaatcaattggatccgaaccgtcacagtcctaaagccatctatcaagatgcggttttaacgcggttagcacaacaggatgttacagttaagatttatgatgcaaacaagaagggtttgtttgcatcgcgcggggcgattggtccgtttccaaaaggcgatacggatacattaaagcgcaaagctatttttggtaagatgcggctgattggcattagtccgattaagacaagtcaaaaccgtgtaattggttatgtagaggtggtcaataacgtccgtgattataaccacgctatgactgaattaagaattgtgttagttgtggttgtcttttttgctatgttatttagtgcattgattggctatttattagccaaccaattcttgcgaccaatcgaagttatgaaaaaaacgatagaagccattaattcagagcctaattcagatgtccgaattcctgagactgggcatagtcaagatgaattatctgatctggtcagtgcgtttaatggtatgttgaatcgaattcagcattatttcgaacagcaagaccagttcgtcagtgatgtttcgcatgagttgcggacaccagttgcgattattgaagggcatctacaactgctcaatcgatgggggaaagatgatccagaggtactggaagaatctttagcggcttcgttacaagaaatcttgcggatgaaaaatttaattcaagaaatgcttgatttaacacgggcagataaagtcgtgactgaaggaacgactgaagtgaccgatgtcggggaagttgttcttcagaattaccataacttcgagatgttatatccagaatttaattttatgctcgacaatgatttgcaccaaccagcgctagtgcatgttaatcgaaatcacttagaacaaattatgattattctgttggataatgcgattaaatattcaacgatacgtaaagaagttcatattgccgtcgctagtgatgagcggtatgcgcaagtggccgtgcaagactttggtgaaggtatttcggaagaagataagaagaaagtctttcaccggttctatcgcgttgacaaagcacggagtcgggaaaaaggtggcaatggattgggattagcaattgcccaacaactcgttgaaggctatgacgggaatgtgtcgctagaaagtagcgttggctacggttctgtttttagagttgagttaccactgattcgtgaagtagaaccaaaatcagaagaaccagttaatacggattaaaaaagcggtgcgcttcaatcatctaattgattgaggcgcaccgcttttttttgttggttaagcttgtggcttatgccgttgcttacctgagttgcgtttgccagctactttaggtgtagcgacagttgggttgcttgtttctgttggtgtttctgtgacgtcggcagctggtttgactgctgctttttgagtgaacatttcttttgtgacaaccgtgacgattggtttttccttaatttcttgatcgatccgttttttaacacgaggcatgatgatgaatgtcgtgattaattgttgaatcaccatgataatcccaccggctaagaaataaagtgctaaaccggctggtgcaaataacgaaatgaagaatgtaatcgcaggactcattaggacggttgtttgcatttgtttcttttgttcagcaggcatcccgactaatgaaagtgcactttgaccgacatataagagggtcgcaatcacagtaatgataatgtttgggctcccaagaccgatcccaaagaagtggctacttgaaatttcaggtgagtattggatggcttgatacaaaccagagaagattggtaattgaattaataaggtcaaacaaccaagacttggcatcatgcttgaatcattttccttataaaccttcatcatcaactggctaagttcagccttttcttcaggggttgttgccgctttttgttgttcttggataatatctaattgcggtttcaagcgacgggtcttttcttgttgggccgtcatcttattcgattggttcaacattaatgggagtaaaatcatccgcacaacgaatgtgatgatgataattgcccagccgtaaccattgatgccaccgaaaacatcagcaatgcgttccataatatgttggagcggcacggcgatgtatttataggatgaaccatagattaagccggttgggactttgggatggctgctcattttttgtggaacacagccagcgagaaagaatgtaacggtcattgtaagcatcgcgagtgtcgcgaagcgtttagaatttttcataaatttagccctttcaagataagtttcaacaagtgtaactatacttgaaggggctaggtttttcaactgacaaccgaaaatttatgacacgctgacacattttcgagcggtgtttgaatgacacggtcgacgcgcccactaggggtgggagaagctttgacagcaccgataaatttttcgagtgcgtctgctgggcccatcgcaataattttaacggagccgtcgtcacgattggcaacggtacctgtgatatggagtttatcggcgaccaatttggtcatccagcgaaatccgacgccttgcacgcggccatagacttcaagttgaattgcattttgcattgtcatcacctcctcttcattgtaagctgttcaacccgatttggcgattaaaaagcgacccttgatagaatttacccactaagtcgcgtataatagaaagtactaaatagactggagcacaacatggaatacattcaatcgaatcaaaacactaaaattaaggcggctaagaaattaaccgttaagaaaaaccaacgtaaagaaaatacgtatctactagagggctggcatttagtccaagaagcaatccaaaataaggccgtcatccgccaagttttcgccactgaaaaatatgtggacgaacgcgcattgcgcggtctttacgatgaaacttttgaaattgcaccagaagtggcgcaacacttgagtgaaactaaagcaccccaaggcatttttgccgttgttgaaatgtctgaaacaccggtaccagaaaaattaacgggtcgttacttattattagatgctgttcaagatcctggtaatatcggcacaatgattcggacagccgacgcagcagactttgccggcgttgttttaggcaatggcagtgttgacttgtataatccaaaactcttgcggtcaatgcaaggcagtcacttccatttaccaatttatcaaggtaacttgatggactggatgaagaaattcaattcgcaagacgtcccagtttatggaacggaattaaatccagaggccatcagttatcaagatgtgcctaaagcaaatgacatggccttgattctaggtaatgaagggaacggcgtgaatgaaaacgtcttagcagccacaacgcaaaatatttacatcccaattccagggaatgctgaatcattaaacgtggcagtcgcagctgggattttaatgttcaagttgattgaagcttaattcttaattttttctaacaaatgtaactttttaaggcgtttaacttcttttttgaacgaaaagctgttatccttgtggcagaatttgaatttaaaaaatgtcaggagtctttgaatgaattcaacagcaaaatggtacgatgacgcggattacatggctctaattgccgatttattagctaaagatgaagtccaaaaattagcgaactatacgcaacatcatcattcagatcgtttggaacattcgctaagcgtctcttatcgcagttatgaacttgccaagaagtggcatcttgatacgcgagcaattgcacgcgcgggcttattacatgatttattctattatgactggcgtgatacgaagttcgatttaggcacacatgcttatatccatccgcgcattgcgcttcggaatgccgaaaaattaacagaactctcacctaaagaaaaagacatcatcgttaaacacatgtggggcgcaactgttagtcgtccgaaatataaggaaagttacattgtatcgatagtcgatgattattgtgctgtgacggaattttgtacaccaatgtggacgaaatttaaacaaaaagttctccgccaaacaccggcaattaacaagtaaagatgcttcaagctgataggttgctttttgcagcctttttcagtacacttcttattaataagtgtgaggtgaaaataatggtgattgtaaaagaaaacgcaaatgctgactgtcaagaggccttccaactgtgtcctaaatttgaaaagactttttcaattttaggtaagaagtggaacggcctgattatcgatgtcctattagaaaacggggcacaacggtttaaaaacttagtgcacagtgtgcctaagtgcagtgatcgcgtattggttgaacgattgaaggaactagaacaagaaggcattgttgcgcggattaccagtgatgattctgcgttgattgaatatcgattgaccactaaaggtgaagaattagcgccagtaatggctgctattcacgattggtcaaacgactggtatgcgacagaagcctagttgctaattgcggttatttacgttaaaatacaattattaaacaaagacgaaaaagagtaacctaatcattagttttcagggagaataatcagttgactgcaagttattcaactaagtttaggtgaagttcactttctgagttgaccattggtccggtattgcccgttagcgcaaacttgagtgtatgactggaatggtcgtaaactagggtggtaccgcgaagcttcgtccctttttgagggacgggctttttttgttgaaaaaaataaggaggaattgcaatgtcattgaaggaacaattagaaaacttacagcaaaagagtctgcaagaaattcaaagagttgttgatttagaggcgttaaatcaaattcgagtggaagtgctcggtaaaaaaggaccgattacagaagttttacgcggcatgcgtgatttaagtaatgaagaacgacctaaggtgggggcatttgctaatgaaatcaagagtgatttggcagaagcaatcgaaacccggaaggcagaattagaagccaagaaggcagcagcccaactggctcacgaaacattagatgttacattacctggccaaccggtcaaaaaagggaccccgcatgtcttaactcaagtgattgatgatttagaagatttatttattggaatgggttatcaagtcgttgctggctatgaagtggaagatgaaaaacataactttgaaatgttaaacatgccagctaatcatccagcccgtgatatgcaagatacgttctatattactaatgatttattgatgcgcacgcacatgtcacccaatgaagcacgtgacttggaaaaccatgactttgctaatggtcccattaagatgattagtcccggccgtgtttaccgccgtgatacagatgatgcaacgcattcgcatcaattctatcaaatggaaggccaagtgattgataaaaacattacaatggcagacttaaagggaaccttagaatacacgattcaccatatttttggtgaagaccgtgatttacgtttccggccaagttactttccattcacggaaccatctgttgaagtggatatttcttgtttccgttgtgatggtaaaggctgtaatgtctgcaagcaaactggctggattgaagttttaggggctgggatgacacatccgaacgtcttaaaagccggcggtgtcgactcagatgtctatggtggattcgcctttgggctcggggttgatcgctttgcaatgttgaaatatggtgtggatgatatccggaacttctacttaaatgacgttcgattcttaaatcaattcacacaggagggctagaccatgaaagtttcttacaactggttaaaagattatttagatttaacaactgccccagaggcattggctgaaaaaattacccgaacagggattgaagtggctgatgtcgcgcaaaagagcgcgggcttgaaaaaaattgtggtgggacatattttaagttgtgaaccccatccggattctgatcacttgaatgtttgccaagtggatgttggtgaagatgaacccttccaaattgtttgtggtgcacccaatgtcgctgctggccaatatgtagtcgttgcattacctaattctcggattgctgacaacgttaagattaaaaaaggcaagatgcgcggcgtggtttcaatggggatgatttgtggcttacaagaaattggctttgccgatagcgttgtgcctaaggaatatgttgatggcatctttgtcttcccagaagcaattgaacctgggacagaagtttatgaagctcttgggatgactgattacattatcgatcttgacctcaccgctaaccgagccgatacgcttggcatccacggtgtggcccatgaagtggccgccattgaatcattgacacctcattttgaagatatcgtagtgactgaaagcaacgttcaaacagctgatcaattgactgctcaagttgctgatgaacaattagcaccaagttatcacttgcgtatgttgcaaaacgtgaccgtccaaccaagtccaatgtggctacagacgcgtttatggaatgctggcattcgccccattaataaccttgttgatgtgacgaactacatgatgttaacgtatgggcaacctttacacgcgtttgatgcggatgctctaacgggtgatcacaaacaaatcgaagttcgtttagccaagacgggcgaaaaattaacgacccttgatgaaggcaaacatgacttaacaaatgaagatatcgtcattacagatggtcatcgaccaattgcgctagcaggggtcatgggtggtttgaactcacaaattactgctgatacgaaaaatgtgattatcgaagccgcagtttttgcaccaactgcagttcgtaaaacggctcaacgccataacttgcgttcagatgcgtcatcacggtttgaaaaaggcgtgaatgttgctgatgttcaaacagccttagatgctgctgctatgatgatggcagaccttggtaatgggcaagtgactgctggtacagttagcccaactaacttagtgccaactgacaaagtgattgaaatcgaagctgaccggattaatcgcgtcttaggcacagagattgcaacgcaaacaattgttgaattattagaacgatttggttttagtgtggtcaatactgataatcatttaacagtaacgattccaccacggcgttgggatattgaaatccaagcggatatcattgaagaagtcgctcgtttatacggttacgataacttaccaagcacattgccaactggcgatatgacaaccggggcattaacgactgaacaaaaggcactccgtaaaacccggcatacacttgaaggtgctggtttaacgcaagcaattagttatgcattaacgacccctgaaaaagcgcgtcaatttacgcttgttgattcggcgctgacagcacttgattggccaatgacgcaagatcatgcgcacttacgcatgaacttgattactggtttattggacgatgctgcttacaatgtggcacgtaaacaaactgatcttgcactatacgaacaaggacgggtatttttaaaacaagcagacgaccaagttcggccaacagaaattgaatatgtggctggcttaatgagtggcaatcgccaaatgaagacttggcaagctgccgcagcaccagttgatttctacacaatcaaaggtgtggttgaaatgttgatggcaagttacaacttagcggatgcaatcagttatcaaccaacacaagcttatccagaaatgcatcctggccgaacggcagccatttacgttggtgaacaactggttggatttgttggtcaaattcatccagcagttgcgaaagctaatcatttaaaagaaacttatgttttccaattagatttagcacaaatcctagccttgccaacccaaacagtgattgctaaaccagcacctaaattccctgaagtaacgcgggatattgcaattcaggtgtctgatcaagtttcaaatgccgcaattgttgaagccatcaaagcaaagggtggcgcccacttagtttcagttgaacttttcgatgtttacgcagggagtcatattgaggctggtgagaagtcaatggcttacaccttaacgtacctcaatgaggcagctactttaacagaagaagaagttaacgctgcttttgaaaaagtagtcgctgaattagttgctacttttgatgccaaaatccgttaatctcgaatctttaatgcaatttttgaataatttggtataatgttttaaggattgtatttaaaagagcaattaggaggtcatcctttgaagaaagttgatcaaaaggagccagtaaatcaagaaaaagcggcacaatcattgtacgaagaacgccgtgcagaaaaaaaagcagcaaataaaattgtctattggattatcggtattctattagcgcttgttgtcattattggattcatgggatatcgctacgtacaagcatctcttaaaccatacgacaccaaagcaaaacaagaaattaccgtgcgcattcccaacggctcaacgaataaacaaatcgctgctattttgcaggataaaaaattaattcgaagcgcgccagtctttaattattatgtgaagactcataatttctcggatttccaagccggttatcatgtgttgaaacaatcaatggggttagataagatcatctctaacttacaaaaagaaggcacaccaacccgtcctcgcgatgtgaagggcaaattgttagttaaagaaggggtcactttagaagaaattgcggccgaagttggtaaacaaacaaaattctctaaagcagccttcatcaaacaagcgaatgataagcaattcttagcaagtttagagaagaaataccctgcattattgtcatcaacaatggctcaaaaggatgtccgctatcacttagaagggtaccttttcccagccacttacgaagtttataaagatagtacattaaaagaaattatcaccgaaatggtttcaacgatggatcaaaagatgcaaccttattatgcaaccattaaggataagaagttaaccgttcaacaaacgttaacgctagcttcattggttgaacgtgaaggggtcacagccgtcgatcgccaaaagattgccggtgtcttctttaaccgtttagacatcgatatgccaattcaatctgatatttcagtaatgtatgcattaaatacccacaagacacacctttataacaaagatactaaagtcgattcaccatataacttatatatcaataaaggttatggcccaggaccgtttaactcacctagtttacagtctgtcacagccgtcttgaatccagctgatcgtgatcaaaattatctctactttgttgctaacttgaagacaggtaaagtatattactcaagaaccttcgaacaacataacgatacaacagattcgattgaagattaggttcatttaggattatcgaagtcgaccgccattggaggtcgacttctgtttgcccaaaaagaagttgagaataaaaggagcgtcccatgtccagtcaaaaaaaagcacccatcattatcggcgttacaggcgggtccggtagcgggaaaacaaccgttagccaggctatcgcccaaaaatttgcgaatcactcagtgatgttattaccacaagatgcgtattacaaacggcaagatgttccgtttgaacaacgccaacaaacgaattatgatcatccagatgcttttgacaacgatttattaatcgaacaagcatcaatgttaaaaaatcatcaagccattgaacaaccggtctatgattataaaattcataatcggacggaggaaattcaacgggttgaaccgcaagatgttattatcttggaggggattcttgtattggctgatgcccggttacgggatttgatggatattaaggtttatgtggatactgatgatgatattcggttattaagacggatgcatcgcgatatggaaagccgtggtcgaacgtttgatgatgtggttggccaatatcttaagacggtaaaacccatgttccatgaattcattgaaccaaccaagcgttacgctgatttaattgtcccagaaggtggcaataatcgcgtggccattgatttacttgtaacaaagattcaatcaatcctaaatgccgattaaagattgagatttgacaaggacgtacacagtaattaagatagtcagtattattaattaaaataaagaggtggataaaatggtacaaaaaacttatccaatgactgcagaaggcaaagaaaagttagccgaagaactagaaacactcaaaatggtaaaacgaccagaagtcattgaccggattaaaattgcacggagctttggtgatttatcagaaaactctgaatatgaatcagctaaagatgaacaaagctcattggaaacacgcatcgcagaagttgagaatatgttacgctttgcagaagtaatcgatgttgatagcatcgcagctgatgaaattgctgttggtaaaacagttagctttacagacgacgaagatggtgaagaagaaacttaccaaatcgttggtgctgcagaatcagaccccttcagtggtaaaatttcaaatgattcaccaattgcccaagcattacttggcaaacacgttggtgataaagtagctgtgcaaacaccaggcggcgacatgcacgtcacaattacagaagttaaataaagtgcgtttcgaacgggttagtctttgaggattaacgtaaaaacgggtgttatggtcgaattttgaccatgacgcccgttttgtagttaaccggaaaaggttgttcgaaaaagcacgtttaagaatagagtgcttttgggtgcggttagcaactgagcattaatacaaaattggcagtcatccagattttaggatgactgccaattttagattaagcagaagttgttgcagccaaaaagcacgtttcaaaaaagccacggaaatcaatcccgtggcttttttattttgccgttaattcgttaatcagccttgagacggattggtgtttatctggtttgcttgtataataatattaatcagttgaaaggggaccgtaaatatgccgtttatctggcgcgtttttttaataatagaagcgattatcttcgggacgttcatttggcagatgattacgatacccgcaaatttagtgttcatcattgcaggtattttactcttagtctgggccaacaaacgtcgtagtaaaggtaaaatcggtgtctggacgactttgttaacgatggtcggttgcgtagctgttacggtaccactgttaattaatttctcgttatggttaatgattattgttgcggtcgtctttttagccttaaatcatagccgaatgggacagtttagcagccgcaatatgaatcagttgtttgataatgccccttggcgcaagaaaaaatttattcccgttaatacgacggaacccaccgcgaaaaagacaacagtcaagcggcatagttggtttggtcatcagacaattggcaataacatttttgaatgggatgatattaacttcgcggtcgctgccggtgatacaattatcgatttagggagcaccattttacccaagaatgacaaccatattgtcatccgtaaggggtttggaaagacacggattttagtgcctgtcgggaccggtgtctatcttgatcactctgcaatgttagggagtgtgacaatcgacaatcagcactataatttgaaaaatgagtcgattcagttgtatagtacaaactatgatgaagaaagtcgccaccttaaaatcattaccaacgtaatgattggtgatcttgaggtgatcttagtatgagcaagttaacgcggagctttatatggatcagcacgagtttgttgacgcttctgttttcagtggcgttattttttgcgtatttctacagtacgcatcaggaacaatggctgattagtttggccacgaagcaattattctatgtaccactgattgtttatattgtggtggccgcaatggcagtaggctttttagttaccgcaatcgtctatcttgtcgtacgtaagcaattatcccatactgaaagccagttacaatttttactttctggacagtatgaatcgcctgtttttcagattagacagagcgaaaccaatgactacgcgatgtcaatcgagcaaacagttgaacaattacgccaaaaaatgatacgcttacaacaagagattcaaagttatagtgatcggccgaccgtgattgctggtgaaaccaaggaagaaattctagcgcaagaacggcatcgtttagcacgcgagttacatgattcagtgagtcagcaactatttgcggcgacgatgatgttgtcggcactcagtgaagttgcgcaaaaacaagctgataacgcgcagatgttgcagtccttaacgacagttgaacgggtgttaaatgaggctcaatcagaaatgcgggccttactcttgcatctacgaccagttaatttggaaggcaagagtttacgcgatgggatcattcagttattgaacgaattgaagaccaaaattgcgattcagattacatgggacattgatagcataacgttaccaagtggcatcgaagataatttatttagaattgtccaagagttgctgtcaaacacactacggcatgcgaaggcccaagagattgaagtatacttgaaacaactcggtcagagtgttttactaaaggtaattgatgacgggaccgggtttgatacgaatgctgagcaaaaagccggcagttatgggttaaacaacattgtcgaacgggcccatagtgttggagggacggcaaaaattattagtttgcctaaccagggaacgagtgttgaaattcgagtgccactattaaaggagaccaattaagtgattaatgtattgatagtagacgaccatgaaatggtgcgattaggcatctcaacgtatttaggggttcaagacgatattcatgtcgtcgatcaagccgtcaatggtaaagaaggtgtcgaaaaggcgcttgcattacgtcctgatgcgattttaatggacttagtgatgcctgagatggatggcattgaggccaccaaaacgattttaaaggcgtggcctgaagccaaaatcattatcttaacgagttttatcgatgatgagaaagtttatccggcgattgaagccggtgcggccagttacatattaaaaacttctacagccgaggaaattgccaatacgattcgtaaaacggcgcaaggacaatcggttttagagccagaagtgacgaataagatgatgaatcgcttaacacatccggctgaacctaagctatatgaagacttaactaatcgcgaacgtgaagtcttaggcttgattgccaaaggccgtagtaatcaagagattgcggatgaattattcattacgttaaaaacggtcaagacgcacgtttcaaatattttggcgaagttacaagtggatgatcgcacccaagcggcaatttatgcgattaagaaccaactagtcgattaatcaggaggagttcaacatgcaaattcaggtgtcagatgcagcaagtcaatggtttcgcgacgaattagccttacaatcgggggatgcagtccgcttttttggcaaagtgtatggtcaaacggccgtgcatgatggcttttcattgggcatggaacgcgctactgttgagcagccaattggttcggttgttaaagatggtatcacctattttgcgagtcaatcggacgaatggttttttgccgattatgatttacaggttgattacgatccagagcttgaagaacctaagtatcaatttgaacgtcgttagacgataaaaagccccgccaaatcatttagcggggctttttattttgggttaaaaggcgaccagtacgcgcccagttttatgcgtcttttggctaagttctcgggctaaatcagaaaaggcgaccaagttaactgttggccaaatttccggtttaaacgtcgtggcgagtaattgccagagttctttacggtctctgcgcgggtaatagactgaatcaattccggctaaggtaatcccacgtagaataaacggcatcaccgttgtttctagggttgcaccagcggcattgccacaagttgctacgaatccgccggcacaaacttgcggtaagatgtgggctaaaacaggaccgccaagcgtatcaataaccccggtgaatgtctgatggctgagcgctttaagcggaccagcagttaggtcagctgtattaataacatgggtcgcaccaaggtgcaataaataatcggtttgttgcaagtcacgcgtagttgcggttagatttgtgaagccaagctgcgcgaggatggtaagtgcgaaacttccgactccgccagtggcacccgtaattaagagtggggtgtcatgatcggctgtaaaggcttggcgtaataatttgctgagcgcaattgcggcggtgaaaccggccgtcccaaactgcatcgtttcagcaagactaagattttcgggcaacttaaagagccattcactagggactttgacatattcagcgtagcccccagcgattgtaatgccagtttcataacccgtacataacacctgatcgcccgcttcaaagaacggattatccgattcgacaacttcgccagcaaaatcaacgccaggtgtcatggggtagtgacgtaagacgccacttttaggattcatagcgagccggtctttgtagttaatatcagaataggcgactttgactaacaccccgtctttagcgaggtctggcgttaacttagtttgataagtggcactgacagtagtatcggtttgttctaaaacgagtgcttgataggcgaccatatgattacaacctcatttctaaataattatttaacttcattatacaacaatgttcgctttgaattggcattgcgtctcggaaacggtataattaataggatattagtcaactaataacgagtctgagagtgctaaagataaaggggacgaagaagaagatgcaacaaccaatggtggaatttaaaaatgtcattaaagaatacgacgatgtccaaattttaaagggcatcgacattgcgttggaaaaaggtaagttttataccttacttgggccgtctggctgtggtaagacaactattttaagaattatcgccggatttaccaatgcgtctgccggggatgttttatttgaagggcagaagatgaacgatttaccggccaataagcgccaagtcaatacggtttttcaagattatgccttgtttccccatctaaatgtctttgagaatgttgcatttgggttaaatctacgtaaagttaaaaaagcagcgattaaagaaaaagtgattgaagcccttaaattggtgcgccttgccggatatgagaatcgcgaaattagtgagttatcaggtgggcaacaacaacgagtagcgattgcgcgcgctttggccaatgaaccaaaagtcttgctactagatgaacctctatcagcactcgatatgaaattacgaaaagatatgcaatatgaactacgcgatttacaacaacgattagggattacgttcttatttgtaacgcatgatcaagaagaagccttagcgatgagtgatgaaatttttgttatgaacgaagggcgcgtgttgcaaagtgggacacctgtcgacatttatgacgaaccgatcaaccatttcgtagccgattttatcggggaaagtaacattctgccaggtaaaatggttgctgattatcaagttgaaatggtcggcaagcagttcgaatgtgccgatgccgggatgcgggtcaacgaagcagttgaagtggtgcttcgtcctgaagatctagacattgttgccgttgaccaaggccaattagtggtaacggttgatacgcagctatttcgtggtgactattatgaaattacggcctatgatgcggatcaaaaccggtggttgattcattcaactaacccagctaaagatggtcaacgagtcggcttattctttgaaccagaagacgtgcacatcatgcgttttggggaatcagaagaagatttcgatgcacgacttgaaagttacgaagaggaggactaaggcaattgcgtaaaaaacaatggttatattacttaccatatgccctctggctaattttgttcgtcctcgcaccagtcgcattgattgtgtaccagtccttctttgatatcaatgggcatgcgacattggtcaactacacgacctatttccagtcaggcacttacttgaagatgacattaaattcgttatggtacgcctttttaattacgctgattacgctattaatcagttatccgacggcgtattggcttcatcaaacgaaacataaacaactttggctattattaattattttaccgacatggattaacttattactgaaagcttatgcgtttatcgggatttttagtcaagatggtgccattaatcattttttggggtggttcgggattgggccacaacagattttatttacgaatttcagtttcttagtggtggcgacctatattgaaattccgtttatgattttgccgatatttaatagtttagaagaattgaatccatcattggtcaatgcaagtcgtgatcttggcgcaagtaattggcaaacctttacgaaagtcatcttaccgttaacaatggctggggttaaagccgggatacaggccatctttattccatcgttatccttattcatgttgacgcgtctaatcgggggtaaccgcgtgattacgctggggactgcgattgaagaacacttcctcacaacaatgaactggggaatgggctcgaccatcggggtggtcttaatcgtcgccatgggcttaatcatgctggtaaccggggagcaaaaagcaaagaagaaggtgactaacaaatgaaaaaaatgaaatggcaaaacgtttggttagtgcttgtctctgtcttattgtacgcaccgattttctatttgattttctattcatttagcagtggggataatatgaatggcttcaaggcatttacctgggcaaattatcaggccttgtttgaagatactcggatgattgaaattgtgttacaaacgttattaatcgcgattctatcatctttatgtgcgacgattgtggggacgtttggggcgttagggatttattcaacgaagcaacggcgtgtgcgcaatatgattttatcgctgaacaatattttaatggtttcacccgatgtcattatcggggcaagttttttaattttcttcacgttcttaggttttggtttgggctttggttcagttttactgagccatatcgctttttcaattccgattgttgtcttgatggttttgccgaagttaaatgaaatgcggccagcattagttgatgcggcacgtgatttaggtgcgactgactggcaagtcctgagtaaagttattttaccgtacattagttccggcatttttgcaggctttttcatggcgttcacctattcgctagatgattttgccgtgaccttctttgtcactgggaacgggtttgaaacgctctccgttgaaatttactccagagcgcgtcaaggaattagtctagaaatcaacgcattatctgccttgatgtttgtcttctccttaatccttgtggccggctactatttattgaatcaaagaagccaagcccaaaaagcacggcgtaaacggaaagcgggggcttaaaatgaataaattaggacgcatcactttagcgattttagtggtctgtgcagccctttggtttgggacggttgaattacaaaaatcacaaggttatacgaaaaataatacattaacattatataactggggcgattatatcgacccagcacttattaaaaagtttgaaaagcaaactggttatcatgtttcggttgagacgtttgatagcaacgaagcgatgtacacgaagattaagcagggtgggactgcttacgatttagcggtgccaagtgagtacatgattgaaaagatgcgcaaagcacacttacttaaaccgattgatcatcgtcgcttaaccggctatcaaaatattggcaaggattttttgaatcaatcatttgatcctgggaataagtattcattgccttatttctggggcacactcgggattatctacaacgatcaattggttaaaaaaccactgacacattggtcagatctatggtcaccagattatcgcggccaaattatggtagtcgatagtgctcgggatatgatggccgtgggcttgatcgaaaatggccagtcagtcaatagcacgaatccggcggttttaaaggcggctaaggacaagcttgatcagatggcaccaaatgtcaaagcgattgtagctgacgaaattaagatgtatatggttcaaaatgaagcgagtgttgctgtgacttggtccggtgaagctgccgagatgttggataataatccccatttgcactatgtaattccagaagagggcagcaatctatggtttgataatctagtgattcccaagacggcaaaacatgaaaaggcggcctatgccttcttaaactttatgttagagcccaaaaacgcggctcaaaatgctgaatatattggttattcaacgcccaatataccggccaaagcactcttgccagcagcaacacggaataacccaggctattatccaagtcaaaaggtgatcgatcgcttgcgagtttatagtgatttatcaccaactgcggttggccgttataatgatttatttttagagtttaaaatgcaacattaaaagtacaatgagcagattgaaatggttcatggtataatagatacagaatttttttggatggaggttacctatgtcatttgaatggtcacagttattaacgtggcggatgctcgcaaatgtgctagacatcatcgttgtctggtattttgtgtataaattaatcatgttgattcgcggtaccaaagccgtccaattgtttaaaggtattatagtcattgcgctgattaaggttatcagttggtacattggtctacgaactgtttcgtacattatggatcaatttatcagctggattgtgattgcgttgatcgttatttttcaacccgaaattagacgtggtttggaacatatcggacgtggatcgctactacgacgcggcgttaatcccaagattgaacaagaaaataatttaattaaagccctcgataagtcgattcagtatatgtcgaaacggcgtatcggggcgctgattacaattcaaatgaataccggtttggaagattatatcgaaactgggattgatttggatgcggatgtgacgggggagttattaattaacatctttatcccgaatacaccattgcatgatggggcggtcataattcgcgatgataagattgccgttgcggccgcttacctaccactttcagagagtaatttaattcccaaagaattagggaccagacatcgggcagccgttgggattagtgaagtaacggatgctttgacgattgttgtttctgaagaaaccggtggtgtcacattaacgcgcaataacgagttaatgcgtgatttaagccgtgatgattatatgaagtacttcaactcgcatttgattacccaagaggaaaacaaaacgagtctcttacaagaatttgttgatggcttcaaaaaaggaggccagaaatgatgaaaaagtttgttgaaggcccatggctctatcgaattttagcgttatttctagcgttgttactgtttggttatgtcaatttggatgaaattaacacgacgcgccagacgaataacaatgatacacagatgctagcaacccgcacggaaaccgtaaaagtgccgctccagattaatgcagatactggtcggtatttcattaccggctatccacaaaaggtcaaagtgaaattatccgggccgaatgcgctagtcacatcagcagttaacacattaaatttccgcgtgattggcgatttaacgaagctgggtcctggtgatcacaccgtcaagttaaaacagacggggattaataaagatatcaaagtcacgattgaacctaaagaaattaaggtccacattgagcacaaagtgacaaagcaattccctgtgcaggtcaatgttaagaaagaaaacttagcggccgggtatagtctaggaaatccaaaactaagtcaagacgtggttgaagtcagtggtgcaaaatcagcagtgaatgctgtgtcgcaagtagtagccactgttgatcccgatgaaggcaccaaaaaagacatcaatgaagaagtcttgttgcaagctgttgatcgcaatgggaaagcgttaaatgttttaatttcaccacaaaccgttaacgttaagatattggttcaaatgagtaagaaaacactcccgattagtttggaaaagaccggtgaaaaaagtggctacagctacagtctgtcatcaacaactgattcagtgaccgtgtatggtcgtcaaacagctttagccaagttgacgtcgttaccagtgagtgtcgatttatcgtcaatcacgagttcaacttcaaagacggttaaagtggctttaccagacaacatttatgagagtacgccaagtgccattaaggtgacaattacggtgactccagatacgaccaatacgagtgctactaatactgttgaagcgccgtctgaaagtacggcacaaacatcaagtagtgcgctcgttgagtcaagttcaagtaacagccaatcaagtagtcaatcaagctcaagtgaaagtagtaaagcaaataccgatgtaaatcaataatcaacgctaaagattttagcaggatgaatggagataattaaatatgacaaagtattttggaactgatggtgtccgtggcgttgccaacttagaattaagcccagaaatggcttttaaattaggacgtgcgggtggttacgttttgaccaagcacgctgataaggatcaacggccaaaggttttggtggctcgtgacacacgtatttcaggccaaatgttagaacaatctttgatttccggcttattatcagttgggattgaagtcttatcattaggcgtggtgacaacacctgcggttgcctatttaattaaggttcaagaagcaagtgccggcattatgatttcagcctcacataaccccgctatctataatgggattaaattcttcggcgcagatggttacaaattaccagacgcaactgaagaagaaattgaagcaattattgatgccgaagaagatactttaccacgtccagaaggcgctggtctggggacggtggaagaatatccagaaggtgctttgaagtatacccaattcttagaacacacgattcctgatgatttagctgggattaaagtggcattggatggcgcaaacggttcaaccagtggtttaattagccgcgtatttgctgatctagaaacagaatttacaacaacggcaacccatccagatggtttgaatatcaacgatggtgtcggttcaacacacccagaaaatgttgctaaaagagtgcttgaaacaggcgcacaagttggactagcatttgatggtgacggggatcggtgtatcgcagttgacgaattaggtaatattattgatggggacaagattatgttcattctcggtcaatatttatctgataagggtcgtttaaaacaagatacgattgtcacaactgttatgagtaatatcggcttgtataaagcgattgaagccaacaacatgcaatcagtccaaacagacgttggggatcgtcacgtcgttgaagaaatgcgtgaaaaaggctataaccttggtggcgaacaatcaggacacatcatcatctttgattaccacaatacaggtgatgggatgttaaccgggattcaactcttaaacgtcatgaaacaaactggtaagaagttatctgaattagcagcccctgttcaaacttacccacaaaaactcgttaacttaacagttaaggacaaggatgcttggttaacaaatgacaagatccaagctgccattgataccgttgaaaaagaaatgaatggtgatggccgcgtcttggttcgtccaagtgggacagaaccattgctacgagtaatgtgtgaagctgcaacagaagaaaaagtaaatcaatatgctgatcaaatcgcagcggttgttaaagctgaaattggtgcataattaaagggagtgctgacgcgagttggttaggctttgaggattaacagtaaaatgggggttatggtgtttcttgccataatccccattttgcagttcaccggaaatgactactcgagaagcgcgttcaagttggtcaacttttgagcactagcttgaaaagcacgttctcacttgaatcaaactaaaaaagcccgtcaacattgtgttgacgggtttttttggtgcaattttatttaagagcccattcttctaacgcaatgtgacttgttcgtacatcagaaaaccaaagacaaccaataagacaacagcagcggatatcagataccattctttgacaagtatgataggtgcatcagtcaaatgataatttttgcggtaacgtttgagattgaaaacactgacttcattcacgatgattaataaagcgggttctaatagtagcatgtatttactaccggttgaatcgacaatgttattggcggcaatatgtaaggcgattgttttaggtgcaacgacgataaagctcagtccgactaataggccaagaagagaaatacttcgaattaacaagatgctctttttcattacagaaactccttttctaaaattgactggtcttagtatagcataaaagcgctagatagcggaaaatatttggactataccaaaattataaatttatatataccaataaaaatgttgacattaaaatcgttggtgctattatatttaagtgttgtaccaattgattaaagaatattaaaccaaagttgaaaagaggatttttataatgtgtggaatcgtaggcgtaattggcaatgaaaagacaactgaaattttattaaacggattagagaagttggcgtatcgtggttacgattcagcgggcatttacgtgaacagcgaaactgggcaggactacttagttaaagaacccggtaaaattagcgttctagaagcagcggttgggcctgaagtacaaggaacaatcggtgttggtcatacgcgttgggcaacgcatggtgttgcgagtcgtgataatgcgcatccgcatgtttctgaagatggtcgtttttacttggttcacaacggcgtgttaactaactatttagctttaaaagaaacatacttggaggatgtccattttgtcagtcaaaccgatacggaagtcgctgttcagttgattgcttaccttgctaagacagaacaattatcagctaaggaagccttccggaaggctttaacgttgattgaaggctcatacgcatttgtcatggtcgatcgtgatgatcctgacaccttatacgttgctaagaataaatcgccattgttaatcggtgtaggtgatggctttaacgttgtgtgctcggatgcattagcgatgttgaatgaaacaaaagattttattgaaatccatgatcgtgaaatggtgacactcacgaaacaaagtgttcaaattgaagatttagacggcacttttattcaccgcgaaagctatcatgttgaaatggatgctgatgcagtgggcaagggcacatacccacactacatgttaaaagaaatcgacgaacaaccagctgttatgcggcgtttattgaacgaatacgttgctgttgatggagagcttaaaatcgactcagcgttactcagtgcaatgaatgatgcagatcgcctctacatcgtggcggctgggacaagttatcatgccggtttaatcgggaagaccttgtttgaaacattaacgcacaagcctgtcgaagtacatgttgctagtgaattcggctatcacatgccgctattatctgaaaagccattctttatctttttaacacaaagtggcgaaactgctgatagtcgccaagtgttggtacaaactaatgccttgcattatccaagcttgaccatcactaacagccaagggtcaacactttcacgggaagctgattacacattattattgcatgcaggcccagaaattgcggttgcttcaacgaaagcctacactgcacaaattgcagttgaattattcttggctgttgcgcttggacgccacaatcaactggtgctagcagaacaattcgatgtacatcatgaattaggcttagtcgctactggcatggaagctttattgagcgaaaaagaacagattgaaaccttgacgactgattacttacaaacaacacgcaataccttttatattggtcgtggtgaagattacgccttgagtttagaagctgctttgaagttaaaagaaatttcatacatccaagctgaaggatttgcagccggcgaattaaaacatggcaccatcgctttgattgaagaggggacacccgttattgcattcttgatggatgccaaaacgattgcgcacacgcgtggtaacttacaagaagtgactgcgcgtggggcaaaagccttgacgattgtcagcgaagaatctgctgaagcagatgatcagatcattttaccaaccgtaaacgacttattgacaccattattggggatcattcctggtcaattaattgcttactatgcaagtttgcatagagggtatgatgtagatcagccaagaaacctagctaagagtgtcacggttgaataaataatattcaaaaagcctcgttcaaagaacgaggctttttttgcgtttaatgagttggtgcatatgttgctcgaggaccgccaacgtattttggtcgtgaccgtaaagctgtgacatgtgcactacccaatgtatcaagggttgggcggacagggacttgaacgaatttcacgtgcatcccaatcgccgtatcaccgatatctaatccagcttgtgcaacgatatgttcaacttcaaccggatcactgaattgttcaaatgcagcgacggagcaggcgcctccagcgtgcatagcaggaacaactgagacaatttcaaagtcgtgtgcgcgggcaacctgacgttcaatcaccaaactacggttaatatgttcacagccttgcacggctaaatgaatccccaatggattgagaatgccacgaagtgttgcgatgatgacttcaccgacttctttgctagaagccttaccgatatgaccaccgacgacttcactcgttgaacacccgaggacgaacaaatcaccatttcctaagtgtgcttcgtttagaacatcctgagtcatctttgttaagtcttgttgaatttggtttaattgtaattcgtttgtcatttaaaaaatctcctagtggttaaataattgtggtcgaatacgggataaactagtgactaacgggatggtaaccacgataccaagtccattttgaacaatattactgaaaatcgaagcgattccggcagcccagccgaaaagtaaactggtagctaaaaagtaaccggcaaccatgacgatactaccgcaaatgagggggataatcagctgctttggtcgcattgaatcattacgagtcaggtgacctacaacgaagccttgccccccatgaatgatgagtgagaagagacaccactcagggtaaccagataatagatcgattaataggccactcagggctccgacagtgagtccgccaggatttcgcagcatgatcgccgttgtataaataccgacctcacagagcgtcacaaagcccttcgtcgccggaatcgggatgatgattaacaaagagagtgccacggtcaatgcggtgagcatcgcgagtaatggtaattgacgtttattaaagtgcatgtttagtagccccctgccagacattccccaggccatggcgtagatgaataccatcttttaaaccggcataaacaaatttctttgcgcgtgccacggcaacttcaatcgattttccttgtgctaattccgccgcaatcgctgccgaaagcgtacaaccggcgccatcaatggtagttgtttccaatcgtggagcttctaaataatgagttgttgcgcccgattttaataaatcaacggcctgctcaccagggaatcgttgaccacctttgataatgacgtgcttggggccaaatgattggataattgtagcagcttcgaccatttcctcacgcgtggtaattgacgaaagaccactgagttgttgggcttccaacaagtttggggtgacaacgctcgtcaaaggcagtagttctttttttaacgtgtcgaggtacgcttgctgcgcaagaatggcgccttctttaaagacgaggaccgggtcagcgatgatggttaattcaggatgctgtcgtagtcgctcacagatggcttttaaagtttccgtttgatgaaccaaaccaattttaacgtgcgttagtggcacgtagtttaaaatggcatcaagctggtccaaaatggtatcctcaggtaagttgtggattttcaagtgaccgtctggtagcaatgtagcgatgcaagttaaggcactgaccccaaacgtttctaaggcttcgaacgtttttaaatcggcctggatgccaccaccacccagagtatcagagccggcaatggttagaatgttttgcatagttgtcctccaaaattctattcttgactatcatagagaagaatagaatgttcaacaacagccaattggcttgtttttttaccatccaatttgtaaactaaataagaggtgttaaaaatgattgaatggttacaatatttacctgaacaaaagccaaagtatatggcaattaaaaaaatgattattagcttgatagataaaggacaattaagttcaggtgaccaattaccgccagagcgtcagttagctaaattattgagtgtcaatcgttcaacggtgacacgtgcgtctgatgaattggttgcagatggcgtgattgaacgtcgcgttggtagcgggacgtttgtcagccagcaagcgcgaccacaggcaaggcgggtcaattggcatacttatttgatcagccaacgtcagtcacaaagtcaaaatgaacggcgccaattacaacaactgattagacgaaaacctgaaaagttaattgatgtttattcaagtgacttaccattagaattagtcccacaatttcaatttcctgcattgacgtggcaagattttattactgcacaagcattagagacaccacgaggctatcaaccacttattacggcaattaatcaattggatcaacacaataaacggctattttttaccgaagagcagttattaatgactgccggtgtgcaacaatcactctttttaatattacagggtttattgacgccaggtgatgctgttgcaattgaatcaccctccttttttcatgactcaactttgtttgaagcgacgggtgtccgtgtctatgaagcttcagttgatgctgatgggatttatttgactgatttagaagagctaatcattaagcaccgtgttaagttggttattctcaatccagattatcaaaatccaacggggcacgtaatgagttttcaaaaaagaaaagcagttgttcatttatgccagatgcatcaaataccaatcgtagaagatgatgtctttggttggttaggatttgatacaactaggccaatcccaacgttaaagcaacttgatccggataatgttatttatattagttcgttgtccaaaattatgggggctagtagccgaatcgggtgggtagctgctactccgcaagtcatcgaacagttgacccgcgtgcaacatgaaatggatttagtgccaagcattatggcgcaagtcatggtgaccttagcgatgggggatccgcaatttcaaacgcagttggatcaacttaaggggacgcttcaagaacgtgcacaagcaacctataagatgcttgaaagggtattacccgattggcacgtttacttaccagcgggaggttattatatttgggtgacccatccgaaccataaattacgcttaaaaacctttattgatcatcagcttgctgtcgcaccaggatcattatttgggcttaaaacagatgcgttgcgcatcaattttgcgcgattaaatgcaattgatttggtcgcgctagaacaacgattagtagccattattaaagcaacagaataaagagggggattcggatgacagagcaattcgtaccagagatttatacaccattaaaaaccagtgttgtcggaccacctgctgtggcgcgacaagttggggggattaagatcctcggtaagaagattaaaacaattatttttaccaccgatgttgcgattgtgaataatacaaatgctgacgctgttttggcagtttatccatttacaccacacccagctgtcatgaatgccatcagcaatgtggcgacgatccccgtttttaatgggattggtgggggcttaacggccggcagccggtccgcgtacatgggattattggcagaggccgccggttcgattggcgtggtggttaacgcaccgacctcggtggagacgattaaaatgattaaccgcgttgttgacgttccgattatttgtactgttgtgtcagaacgacaggattatgccgcgcagattgaagctggagtttcaattttaaacgttagtggcgcggctaaaaccccagcaattgttagtgcaattcgccaacaatatcccgaaattccgattatggcaactgggggtaaaaacgaagctagtatattagcgacgattgaagcgggtgcgaatgcattgacgtacacgccaccgaccaatggtgagttatttgctaagaaaatggccgattaccgatctgatttagtatgataacagttgacgtgctatgcaatcccccgtatgataaaaagattactagaggaggtttttgaatgattcgtcaagcaacagttgcagatgacaagagtgtcttgccaattattaatgttgtttttgaagaaatggaaatgccactcttccaaaagattccgctagaggatttgtttagcattttagaacaggcctttgcaatgcctgaatatcggtatagttatgctaacacactagtttatgaagaggatggtcagattttgggcatacttgttagctttcctgaggaaaaagaggctcatattgatgatgcccttgcaccgttgtttccacaaattggcttacctgaaacaacgcgtttctttaatgataaggaggcacagccaggtgaatggcatattgatacaattgccgttgttccacaagcacgtggtaagggtgtcggatctaagctattggcagcatgtgaatcagttgccaaggctaatcacaaacagattattagtttaaatgtagattttaataatccaggtgccaaaaaattatacgaaaaaatgggttatcaagtcgttggggaattgatgattggtaatcatcaatatgaacatatgatccgtaaaataggctaatccaataccgtggtataatgggagtagtgatcaactattttggagaggtcgtaggatagtatggataggcgaaaaggcttattggctgaactcaatcaatatgtctatagagcgattataagtgcagtggggatgtcgatttatgttttagcggattctttcttcgtcgctaaaggaattggtgttctgggggtcaccgttatgaacttaacgatgccgctttttaacttgatggaaggtttaggattactacttggaatgggtggcgcgacaatttttaccatctataaaattagcaatccaaagattgccaatcgtgtctttacgcaaatgttttatattgggctattattgggcgcttttttctcgatgtgcggactactttttgcgtcgaaaataactgggatattgggagcagatggagagacttggcaacatacattaagttatgtcagaatcatactaatttgtggtcctttttttgtatttaataatttaatattatcgttcgttcggaatgatcgggggaccatgatagccatggtagcgatgattatctctagcttgactaatattttactcgattggctattaatacttgttttaaaattaggaatggtcggtgcgggactagcaacaagtttatctccaatgattagtattttgattattcttagtcacttttttaggcaagataatcatttaacaatcggctggtatggatttgattttaaaattattagtagtgcaattcaaattggcttaccctcgtttttaacagagatgagcaatgggattggtatttttgtatttaacttggttatcttgcatattagtggcaatatgggtgttgcagcatacgggattgctactaatattttattagtggtgcttgccatttttacgggtgttgctcagggaatccaaccacttgtaagtcgctcctattcagagcatgcattaccaaaaattaagtttgtattgaaatatggcgtagcttgcgcattagtgattgggatagttgcatactttattgtcttccaatttggcgcgcagattattggcgtatttaatacggaaaataatgcgcaagtgattaaaattgccagtgacgggatgccaatctatttcttaagtatctttttctcggggataaacgtggttttgaatatattctttgcatcaattaataagacacgcatttcacttgcattagtttttgtacgtggctatctattagtagcagttgtattaacaatcagtgcgctttgcttcggaatgagcggtgtctgggcaagtttaccaataattgaactaatttcagtgggtcttgctattatgtcttatttccgagtggaaatagaattgaagaatggtattttcgagattggctgactgaatgaattaaaatagcatgaattattttagaaagcaactaatgaaaatagctggtttaaaatgaaaataaaaaaatataaaagtttaataaatgtataaaaataatatatttattaaactttttattttttctcctttttcttagagagttaatgtccggaatggcggctattagataaaaataatggtagtgtaagttattgacagtaagcattcattttaatatgtatacatcgcgaaaatagaaagcgctcacaaaacgcccttgcagtacttttacattagtgttaaaacataagtgttagttatttaacaaagtagagatttgggagggtacagacatgacaaaaatgaaaattgctgtttccgctgatttaaaccaatttttttcaacggatcggcaaaccgtattagttgagaataccgattttgtggatgtcgcagctgttgttttatcagatactgatttgcaatatgtaacaactgttgatgatacaaaatttgatatcccaatttttattgttactgataacagttcaacaatcggaaaggatgtaatggcaaaaattttccatatcattgatacgaaaaatgaatacgattacagacttgctaatagagaaattgaagctgctgctactaaatatgaagaaggtgttttaccacctttctttaaagaattaacagcatatgttgatcgtggcaacattcaatttgattgtccaggacatcaaggtggtcaatatttccgtaaacatccagccggaagacagttatacgacttctttggcgaaaatatttttagagcggacatttgtaatgcggatgttgatttgggtgacttattaatccatgaagggcccgcaatggatgcacaaaaacatgctgccaaagtatttaatgcagacaagacatattttgtaatgaacgggacaacaacttcaaataatattgcgatcacttctgcaattgcgcccggtgatttagtattatttgaccgaaataatcacaaatcaatctataatgcagccttagttaaagatggtgggcgtccagtttatcttgaaacatcacgtgatccttatggctttattggtggtatttacgctaaagatttcgatgaagactacattcgccaacaaatcgctaaagttgatcctgaaaaagctaaagctaaacgaccattccgtttagctgttattcaattaggaacttatgatggaacaatttataatgcaaaacaagttgttgaaaagattggtcatctttgtgactatatcctctttgactcagcttgggttggttatgaacaatttattccaatgatgcgtgattcatcaccattattactagacttaggacctgaagatccaggtatcttagtaacacaatcaacacataaacaacaagcgggattttcacaagcatcacaaattcataaaaaagattcacatatcaagggtcaaaagagatatatcaaccacaaacgcttcaataatgcttacatgcaatatgcgtcaacttcaccattctatccattgtttgcaacattggatgttaatgcgaagatgcaagatggcgaagctggtaagcgattatggcatgatgctttggttgtttccgttaacgcgcggaagagtttgttaaagaatgcatcgatgattaaacctttcttaccaccaatggtaaacggtaagaaatgggaagatgctgatactgaagaaatcgtcaataatatcgactactggcgttttgaaaaaggtgcaaaatggcatgcatttgatggctatgaaaataatcaatatttcattgatccaaacaaatttatgttaacaacaccagggattgatgttgaaaccggtgaatacgaagattttggtattcctgcaaccattcttgccaattatttacgtgaacatggtattattcctgaaaagaatgatttaaactcaattctattcttgatgacacctgctgaaacatcagctaagatggataatttagtttcacaaattattaagtttgaagccctagttaaagcagatgcaccattaaaagatgtattaccttcgttatatgaagcacataaagaaagatataatggttatacaatccgtcaattgtgtcaagaattgcatgatttctataaagaaaataatgcaaaggactatcagaagaagatgttcttagcagaacacttcccagaacaagcaatgaaaccatatgatgcaaacgttgaattattgcggaataacgctaagttagtcgcattaaaggacattcagggagaaattgcacttgaaggggcacttccttacccaccaggtattttctgtgttgttcctggtgaaagatggtcagaagtagctcaaaaatacttcttgattcttgaagaagggattaacaagttccctggatttgcaccagaaatacaaggtgtctattttgaagatattgatggttatactactgcatttggttatgtattagataaataatgatcaaacaaactttaaacgtagtgcacattctgatgtacactacgtttatttttatgatgaggtgagttaaatggcaaaagatgggaaaaaaatgagtgttatacagttaacaattatcactgccatcaatatgatgggttctgggataattatgttgccaactaatttagcgcaagtcgggacaatgtctattttatcttgggtggtaacagcaacaggggcgatgtgcttggcatacgccttttcacgggctggtatgtacactaagaaatcaggtggtatgggcggttatgctgaatactcatatggtaaagccggttcattcatggcaaactacacatatggtgtttcgttagtaattgcgaatgctgccattgcaatttcagctgttggttacgctgcagtgttgttccattggcatttgagcccagttgaggtagcgattggaacaattattacactctggttagcaactgtacttaactttggtggtgctaaaattactggtaagattagttcatttacagtctggggtgttattattccagttgttgtgatttcaattggtggttggttcttctttagtggcacaatgtacgctaatgcttggaatccacatcatttaagtttctttaatgggattagtaaatcaatttcaattacattatgggcgttcttaggattggaatccgcatcagctaatatggattctgttgaaaatcctaagaaaaatgttccaattgccgttttaggtgggacaattggtgctgcaattatgtatattatttcaacaaacatcatgcaagggattgtaccaaacagtgttttggcagcatcaaatgcgccatttggggttgcatttagtcaaatgtttaacccaacaattgggagtattgtacttgccttaatggttatttcttgttttggttcattactaggttggcaatttacgattgccgaagtgttccgcagttcagctgttgaaggctatttccctaaagtatttggaaaagtagttggtaatggcacaccaatcgttgggatggtcattattacaactttacaatctttattatcattaatgacgattagtccatcactttcaaaacaatttacggtattggtaaacttagcggttgttacgaatgttattccatatcttctctcgatgggagcattaaagacaatgcaattagatgccaaagtatcacctaaatcgatgaagataacaaatgcaattgcaatggttgctgctatttatagcttgtacgcattgtatgcggttggcttcagagaacttgcatatggttcattagtaacatttgcaggttggattttatacggaattgtttcacatcgctttgatttgaaacctgaaggtcaaaaatagtggtagtgattaattaattattcagtttaatcaatttaatcaattaaaaaagacgatcatgaagtgaacccccgatattggaccaaaatccaatatcgggggtttttatattgaccaaatattctaaaacattaggactttttgtcttaacgctgttttttttgtgactttaaggggccttttttaattcgcattttaagcaagtttcgcgaccacttgtccactcactaatctgaaacgtccttaaaatgcgcctctggtgattgatcgtttataaacgtgattagaccgtgatttagccatcaatagcctttaatgtgtttgagcgcattcctttggtagaaagaatgcgctcggaatccctttaaatcaacgataatcaaaggtgcaaaataccaccgcatggtttataatgatatagagaaaaagaatgcggtcaaaaaggcggaaaaaacatgcggaaatcgcgcactaaaaaaggcaaaaaattaaatgttcaacctttacggacaaaagatgagattgaagacatgaaagtcatcttgcgccattcacaaatgggtagtcgcaattatttattatttttactcggcattaatactggcttacgctgttctgatattgtgcagttaaaagtcaaagatgtgatcgaagacaatcccgtgattgttgaacaaaaaacgggtaagtggcgccaaattagtttggcgagtttacgcccatacatcagtccctatattcaaaataatgaattgctaggcaatgattggttgtttcctagccgcgtcggcgataaccacatcaccgtcaacggtgtttaccgcatgttgactgaagcaggtaagaaacttgggcgtaatgatattggcacccatacgatgcgcaaaacttacggctactggttctacaaacaattcggggacgtgcggtcattgatgattgattttggtcattcaacgcaagaaacgacgctccattatattgggattacccaagacgaagtgttaagcaagaaacaacaactggcgattggactttaaaaaaagcttgcattaaagtgaggtctaaggtgtatagtaaagacaatataataggaagagataggagattatagttatgaaaacagctacttttatgggtcctggtcaaatgaccattaccgaagcaccaaaaccaacgattgaaaaaccaaccgatgcggtcgtgcgcattatccgcgcgtgcgtctgtggttctgatttatggtggtatcgtgggatttcaaaacgagaagtaggcggtttcaccggtcacgaagcaattggcatcattgatgctgttgggactgacgtacaaaatgttagtgtcggtgattttgtgatcgtgccatttacccatggttgtggccactgtgccgcttgtttaaacggttttgatggcgattgtaccaaccgcgagaataatcctggtggctaccaagccgaatatctccgttatcacaatgcaaactggggcctcgttaaagttcctggccaaccaagcgattactctgatgaaatgctgaataatctattgacgctttcagacgtcatggcaaccggctatcacgctgccgtgtccgctgaagtgaaacccggtgacacagtcgttgtcatgggtgatggcgccgttggtttatgtggtgtgattggcgccaaattactcggtgcgaaacggattatcgcgatgagtcgtcatgcggaccggcaaaaattagcccttgaattcggcgcaacagacattgttgctgaacgcggtgacgaaggggtcgcaaaagtgatggcgttaaccgacaacgctggggccaacgccgtcttagaatgtgtcgggaccgaacaatccgtcgccactgccgtcgccgttgctggcgcaggggctgtcattggtcgtgtcggcattccccaaaaagcagagatgaacaccaatgccttattccggaagaacatcggtttgcgtgggggaattgctgccgtaacgactcatgatcgcactcgtttattggatgctgttttaaagggtgccattaatcctggtaaagtctttacacaacgctttaccttagatgatattcaagccgcttatgaagcaatggatcaacgcaaagcgattaaatcattattaatcatcgctgaataatataaaaagtgccgcagaacaggaaaaatcctgattctgtggcacttttttaatgcgcaataagacttaatagataaccgccaagacagccgaagatcagactgagcaaactcccaatgaggtaatattcggcgaagtggtgttcgttggattcaatggctttaaagcgggtcagcgccttaatcgccacaatcacagcaatactcgcaacattgtgcgtgtaaaacaagattaagatggcaaaccgttctaaatgaccaatatgccgacccagttttgcaccatctggcaggcgatccatgtttaaatccagtccttttaaatagaagctaatgaaataatcggcaaataataacgtgctcaaaacaatactggcagccaataacaatcggttcacatggttaaacgcccattgctggccgaggaacatgctcacaagaccgatcactattaaatggagtgcttgatcgatggtataactcatcactggtacgcgattgctggttaaatgtagctgtgcttttaaaagtggctggctattttgcttaaatagatcaatgagccaatgactcatcacaatgatgactaagccgattagtaacggttgccaatgtggccaagtaggtggtgccattaaccaaccgccaccccataaaataagcactaacgggacttgtgtcagtgcgtgcttgcataatggccaccatttcacaccgagtttcgttgatcgtttgcattgagccatctgatcagattgaaagacaaagtcgcagccaatatgactaagcaagaaaagcgcaaagaggttcattcgactgcctccttaaaggtcatcagttgcgcgcgcaacgttgccagggtctgttcaatcaagggatactgaatctgattcagtaagcgactgactttactagaggctaatgcacgccctttttgatcactgtagtctagttcataggaagcaacgccgtatttggtccacaacaattccgctaattcatagcgtttcaatgttggttgaagcacgatttcagcaaaagcgtccttgcgcaactgcgtattcaagagttgctcataaattaaataaaagagggcattaatcccatttgcggctggttgatctgccactaattgaaattgaaaggccgtcgtcataaagggataaccttgtgctaattcagcaccttgacgcaacagtttggcttgatctgctgcggcgagggcgttcacaattgctgtcccgttgacccgattgatatcctgatagtcacttggactcggcgtagtcatcgttcctaagccaaccccaaaataaaaagtgggctccgccagccccgcaaaatgtgtctgccagaaagtttgaaaagcgtcactctttaaataggcattacaaaagggatagacatcaacaatctgtgcctggtcatccgctgaaaaaccgcccaatagaccatcaccatccttaattgcaaatggtgttaataacgctggaaaatggtgattcaacgtgtcggcgaagtgttgcaataactggagtgtctgtgcttgttccgtaaaacgggtgcggctatccgctaaatcaatgaaacaataggctgtctgcatcgttctcatcctctctgaaaacatttgattataagtacataataggtgaatatgaacgaataatcaaatgtttttgaggagcggtttacatttcgcagcctacgtattatagttaactacataagtaactaaccaattaacgaaacggaggtgttccggatgctttttgaatttaataatgatacaccactctaccggcagattgccgaacaaattgaagagggtatttttactggggtctttccacctggtagtcaagtcccatcgacaactgaaatttccagacaattcaatatcaatccagccactgtactcaaagggatgaatcaactcgttaccagcggcttaatcgaaaagaaaaggggactcggcatgttcgtcacatcaagcgcacccgcacagatcactgaaaaacggcaatctgaattttttgaacactatgttgcccaatttatcactgaagcacaacaattaaatctaaccaaagacgacctaattgcactgattgaaaggggttatgaccatgcctaatttacaaaccacacaactgattaaacaatttgggaaacaggtcgtcctcgacgacatcaacttaacacttaaacccaatacaatttacggcttactcggccgcaatggggtgggtaagagtaccttattaagtattctagccaatcatcaaactgcatccctaggtgagattaaatggggcgatacggtcttaaccggtcgcgatcatccgttacaaacgatttacttgatgtcggaaatcaatctctttaataaagatgacaaattgcggaccattattaaaaataccgccttactgcaaggttcatttgatcatgcactcgccaaagaaatgctgactgcatttgatttgaatccaaaaaagaaactcaatcagctttcaactgggtaccgcacgatttttaaaacaattgttgcgctttgtgtgccggcggaatatgttttcctcgatgaaccagtcttaggcttagatgctaactaccgcagcctcttataccgctacattttacaggcctatgaaagtcggccacggacatttgtcgttgcgacccatatcatcgaagaaatcgcgaccttagtcgaacacgtcttggtcttgaacgacgctcaattaattgtcgatgatgatttggaaaccgtcctcgccaagagttaccgtgtcagtggcccggaagaacttgttcgcgagtactgtaccgacttaaacgtcttagattcccagcaaatggggaccttatacacggtttatctttatgacgtcttaccagaagaacgggttattccagatcgtctaacgattgaccatatcgatctacaagaaactttcattaaattaacgaacaaaggaagtgaagcacatgtttaatgcaatgatgcggtaccgcctagcagcgatttggcgcggcttattaatggcaattgccgtcttcgtcatcatcacaggcggttccattttaatcttctccaaccaaatgacctggaaggccttttggttcacgctcttgagcggttccttagtcgtcagccaactcgttctgattttcctttcgtttgcgacaacccgcaagccgtttaattttgggattctaaatggcattccgcgcagtattagttataccacccaagtgattagcctcttcagcagtcaattgattagtttcctagcactctacggcggcacatacttcattgctgcccaccaaagtgggattaatcgcttctttcttgatagccgtttcgtcctgctggccattgtactcatctggaccatcatggcagaagggattgccattagcagtttcattacgttatttgaacgtaaagcttggcttttcttatttgctgcatggctaattctgtcgacactctatcaacactacattgaaccagcgattgaacgcatgttaccaagctgggtggatacttttgtcctgaacattcctggtgatcaaccaatgaaccaactcgcaaatctattccaccaaccgattttctggattagtggggtaataggcatcctcatcccattagttattgctggtatttgtcaacacttcatgcaaaccagacgcatgacgattcgttttaaacgatttgcacgttaacctaaaagagctactaccaagattattttggtagtagctctttttagctagttactattgtgctaataattcaactaattctgtttttggaatccctgtgaagtaggacgtggtgtcgattggttcgagagtgcttgctaaatgttcacggtcataaaccgtgccgactaacttttcagccaattcgttggcatcgccggaaccgaagaagtcgccgtagaacttgacgttggcaatcttcccattttcgattaacaagcgcgcatcaatcgtcccgaaatcgaagtgtttgcgtttttgaatcgttgatttaggtgacttgccatagacccagtcccaattgctatagagatcgttaaaaatcttatcgatggcttgttcgtctgcggccgttaattgatattcgcggtcggcaatatcagctagttgatcggcgtgcatcaagttcagtaataagacgtctctgaactcttctgtcgacatgttttggtattcagggtcaacgtgcccttttaggtttgtgacgcgttgtcgaatcgatttaatgccttttgacacaatcttatctgcagggacattcaaggcttgggtcaaaacatctaaatcaacatcccatgaaagggtgccgtgggagaaggttttaccattcttggtgtacatcgcgttccctgagaattttttaccgtccactaacatatcattgcgaccagaaacttcagccgttgtggcgcccatttgatggagtgcatcgacgattggttgcgtgaaggatttgaaatcaccgaattgttcagaatctgcgttcaccacgaaactgaaacaaaggttaccgagatcttgataaatcccaccgccaccagacaaccggcgtgtgactgtaatatcatggtcttccacgtatttttgattgatttcttcatacgtattttggttgcggcccacgataatgcatggtttctcaatgtagaatagtaagagtggttcatcgaaatttttttgattcattaaatattgttcggttgccaagtttcggcgaatatcatttgacttcatcacaacgtaatacatcagcataaaacccctttcataatcactacggatttattatactacatatcgcatcaaccagtgtactgaagcattaaaaaagcggtccccgataaaagggggccgcaggattaatcatcgctatattctaaaatatcaccaggttggcagtctaatacgcgacataacttctcgagcgtcgaaaagcgaattgctttggctttaccggtttttaaattcgaaaggttcgcaatcgtaatatcgacctgttcagcaagcgccgtgacactcattttccgttgagcgagaattacgtctaaattcacacgaatggccattgaattcctccttagaccgttaaatcgacttcagattgaaaggcgattgcacttttaaaaagatcttcaacaatctgcatcaaaatgaggattgcaaacggaatgaagaccaggcctaaccccagcaacatcaagcctggtgcatcttcgagttgcgtaatccggtagaaaaagggtagggcaaaaagggccgtcaaactcgcaaccaaaatcgcttttctaattgctgatacatatcgtagcgtctgagggagaaaaacttgatggtgctcaattaagcggagaatctgcgccaacttgattaatgcaaaccaaatactagccgtcacaccatacgcagcaatcgccaacatccagattgtcgctgggtattctaagtgtttcgtggtcacaatttggatcgtcactaacaaacttaacagaccaaataccgccgcaattccgagtaatgccattctaagtagccatttttttaacattcatctgatacctcgtttttaagaatagttttattataatcgttttttattgaaaaacaattaatttttatcgtttttcgataaaacttaatatttaagactagtcaaagtaggcgtaactgttataattatagggggtaaactaaactgtgaaggactgatcttatgaaaatcaggcatctctggctaacattgacgctgaccgttgcattattgggactaacagcctgtcagaaccatcctgcaaaaacaacgacgcctcagcatagttcgcagaaaaaaacggtgcgtccacaaaaccaacagacttacgacaaaaaagatgtccaagcctattggctgtcttaccggcataaaacctttttcgtcattgcgcatcaaccgaatgaacaactgaatacgaaaaataagctcaaaacgtttttgagtcaaacaactacgcaaacactagcgcacgattcctatcaaaaactggacgaagacggcttcatttttattgccgataatcagtttaaaccacaccaagactttggctatgggatggtcacagtgggcattccacgcgacttcacactacaagccattgttgccacagccaatctaaacgacccgctctacaatcgctatccaatttatcaaattcaatgatcagggagaaaacaatcactatgaaaaaaataatgccagtctttattttattactatctatcacaatgttttttatgactggttgcaatcgttccattgaaacacatacaccatccaaaacacagactaaaaaagggactagtttacctaaacatggaacaatcagattaacaactacgactcattcgaatcaaaagaaagtctctggttatatttatcgcgtcggtaacgattatttagtgctaaactctgtaaaagggttcatcaaggatgccactgctatgaaacactatcttgaaggtggcaaagaacaaactacaaatacgtattttgaccagccaaatgtgtttgcaatcgctaaagatcaagtaggtaagcatgctaagctgtttaaacttgcgtacggcacgatcacttacgaagagcttcctgaaaatgatcgcgcgtatgtctctttcgctatcattacagacaagaatattgatgaattacccaaaatcaagattgatcaaatcgactaccaagtaatttaaactaaaatagcgcgtctcactatcttacaagtgcggcgcgctattttattctagtcacgccgttgatacgccatgactgtcagtggcataaacaccagaataatcacagcgccactgacgaggaccattgttgcggttccgctccaatgaccggtgttcaaaattcctctgattgccgtaatggttgtggtgacaggattaatgcggacaatggtttgtagaaaatgcggtaaggttttaactggaataaaggcgttcgataagaaggtcaataccagaatgatgatcatcgataaactactaatcagttcgacatttttaaccagtaaaccgactaaggcgaaaatccacgacgttgaccagccaataaagacagctaggaataacgccatcatgagtgcgccaaaattagcggtagggcgccagcacatcactgacattatcaggattatgcaaggtcttcagtaaattccgatgggttaacgttaagctattgcgcaacacttgcgtatttgttttcatttgtagcatgttattatctccttagtttttaccaacggtcattttcaaaaagacgtcatctaacgatggggctgtcaattgtaaatcgctgatggtgatgcctgccagctgacattgatttaaaatcgcggtgatgacgcccatatcatcgtgcactaacggtccaatgattgtttgatccgtcacacgcacgggctgttgcaaaacggtctcgcaaatcgtctgagcctgggtaacttgttgttgattggcaaccgtcagctgcaactgctgaccaccgacttgcgctttcagctcactaggtgtcccactggcaatcaattggccatgatcaatcaacgcaatccgatccgcatattgatccgcttcctctaagtattgggttgtcaaaaagattgtcgagccatccgcgactaatttttgaatcgcatgccacatttgcgtccgggttcttggatccagtccagtggtgggttcatcgagaaagaggatccttggcttgccaactaagctgaccgctaagtccaaccgtcgccgcatcccacctgaaaaagtcgccaatgtttgatccgctgattggtccaaatcaaagtccgtcagtaactcgttagctcgggttcgactcgctttggcactgagcccatttaaccgcccaaataagcggagattctcgcgcgcacttaagtcttgatcgattgccgctgtttgattggtgacactaaactgttggcgcacttggcggctttgtgttatcgtatcaaagccatttaatgtgattgtgccactatctggtcgtaggagggtggtcatcatttttaagagcgttgttttcccggcaccattgggccctaataatgcgaaaatctcacctttagaaacggctagcgaaacggaacgcaccacttttttggtcccaaatgctttttgaatattgtttacttcaatgacatgctcactgcacataatattgcctcctcatttaataatcaggtcacctgattaaaatgtcaaggattgctactcttagattttggaatggtgtatactaattaaaacagcgaagggaagatgacgtatggcaaagagtgtcaaggccgaattggtcgccggaaaattagctgaatatgaacaactcagtaagatctacgatgatatcgttaaacaagcacgcccgcatttaatcgtcgaaggccaggggaagattctattggcacttgctgatgaagatcacttatcgcaacgtgaactagcaacgcgtttgggaatgtcacctcaatcaaccagtgaatttgtcgctaaactcgctaaacgcgagctggtgacgttaagtaagctcccaagtgatcgccgggttaatttagttaacttaacggatgccggtcgtcaagaaattgaaactgccaatcaagaggtgccaccgtttgtgaacgccttgaccgaggcagaactcgaccagttagtgccactactcaacaagattacaacggcgatgtatgccgatattgatgcctcaaatccgacgttgggcgttaagtttcataaattattggccggacgatatctgaaacaatttaaaaaataaccaaaaaaatagcgcgtctcacttaaattagtggggcgcgctattgcatttaattaatcaaagtcgtaatcactatcttccatcgcttccacattccctaagcgataaccattcccaacttgggagaagaaatcgtggttggcagttgaagtcgacatcccattcaagatcacggggttcacatcttcagcgctatctgggaagagggcgccttggccgaggttcattaaggctttgttggcgttataacggaggtaagttaatacttcttctgtccaaccagtgccatcataaacttcgtgggtgtatttttcttcgttggcatataagtcgtacagtaaatcatacatccagttttgcaattcttcttgttctgacttatccaattcattgaaggctaattggaacttatagccgatgtaagtcccatggactgactcatcacggataatcaatttaatgatttcagcaacgttggccaacttattgttccctaagtaatagagtggggtatagaaaccagaatagaagaggaaggtttctaaaaagacgctggcaattttttgttgcaatggtgtgccgttttgatagatatcgttaatcttgttggctttgtattgcaagaattcattcgtgttggtccagtcgaagatttcatcaatttcagttggtgtgtttaacgttgaaaaaatggatgaataactcttcgcatgcacggattccatgaattgaatgttgtttaaaacggcttcttcatgttgagtgcggatattggcttttaagctggccatcccatcttgtgattgtagcgtatcaagtagggttaaaccgccaaagacatgcccgacgatccatttttcattgtctggtaaactgcgccagtcatctaagtcattggaaaggggaatccgcgtatctaaccaaaattgttcggttaatttttcccaggttgctttatcaatttgatcttcaacttggttccagttaattgcaatataattttctgccatgttcatgaactccttttaacgtgcttcttttttaggtatgtaggccagctgacgagcagctggagtggagatttggtgtttgctttgaaacgtgcttttcaagctaactttctgcgcttagcccagtgaatcaaatcatcgactacttcgctaattcgcttccctatgctaatgctcaaaatataaacgcctgccgtcgcactctgttttgaaacgtgctttttgaaactgacttctgcgcttagttacactcggcgaataactgcttataagcagttattcgccgagttagactaatgctcaaagtcaaaccgtttcaaacgcactctagattacacaactttcgcatgcatttgcgccgacttcactttcgtcgtctgtgtaagtccggatgtagtagattgatttaatccctttgtggtgggcgtagtttcttaagatgtttaagtcccgggtggtcattttgtcagtccggccgtttttccattcgtaaaggcctgctggaatcgttgaacgcatgaagagtgtcatactcatcccttggtcgacatgtttttgtgctgctgcgtagatgtcgatgactttacgcatgtcaatgtcataagctgattcataatatggcatggtatcgtttgaaagacctggggcagggtagtagattgtcccaattttcttttcttgtcgatcttcaatccggttaacaatcggttgtaagctagcagaagtatcattgatgtatgaaattgaaccgtttggtgcaacggctaagcggttttgatggtataaaccgtcttgcatgatggctagttttaaagcttcccaatcggcttttgtgggaatcataatgtccttgaaaatcgctttgactttgtccgtcttaggggcccagtcttcagtgaggtattgatcgaagtaactaccatcagcatacttactcttttcaaagttggcaaaggtcatctgacgttccttagcaatcttatttgaagcaacaagtgtccagtagtttaaaagcatgaaataattactggtaaagtcgattgattcttctgacccatacatcatgtggttcttggcaaagaaggtatgcagacccatgccacctaaaccaatggtgtgggccaattcgttcccatgagccacagaagggaccacatcaatatcagaatgatctgtgacgtaggttaaagcacgcaccatggcttcgatagaaccaccaaagtcaggtgacgtcatcatgttcggaatattcgttgaacccaggttacaactgatatccgtccctaacacgtcatattcttggcggttattaatttgtgacggggtttgcacttggaggacttcagaacagaggttactcatgatgatcttcccatcaattgggttcgcagcattggctgtgtccacattgacgatgtaaggataacctgattcttgttgcaatttactaatttcattttctaaatcacgggctttaattttggttttcttgatgttatcgttggcgattaagttgtcatattctttggtgatgtcaacatatgagaaaggtacgccgtattctttttcaacaccgtaagggctgaataaatacatatcagcatcagctttcaccaattcatagaacttgtcggggacgactaagcctaatgagagggtctttaaacgatatttttcgtctgcattttcttttttagcacctaagaaagcaatcacatctggatggaaggcgtttaaataaaccacgccggcgccttgccgttgacctaattggtttgagtatgagaaagaatcctccaataacttcatgacaggtaggacaccacttgctgcaccgtcgatgcctttgattggatcgccagctccacggaggttcgacaagctaatcccaaccccgccaccaatccgtgataattcaagtgccgagttaatcgtccgaccaattgaattcatatcatcggttgtttggagtaagaaacatgaaactaattcaccacgccgtgaacgcccagcattcaaaaacgatggtgttgccggttgataacgttggtggatcatttcatccgctagttgcagcgcaagggtttgatcaccatctgcgaagtagagagcattcacaaaaacgcgatctttaaaatcttcaagataaaagccattgtcgtttgtttttaatgcgtattgcgcatagaacttataagcagccataaatgacttgaagtggaagtcttggtcctttaaatattgattcaattcttccatgaatgaaagagaataagccttcaaaaaatctgcttcataataattttccgcgactaaataatctagacgatcttgaagtgatttaaacgtcaccatattgggttgtacgttttgttccaaaaaggcatcgagtgcttcttgatccttttgtaatggaatttgaccattcactggaatattaatttggttattcaattcatagtatgttacatcttcggttttaatctcttttaaagacatccttgccaccactttctagtcatattagctgttttagggtttaaaaaaagtgaagaccaactctttagtaatcaagagtcggcctcacccgttaaaactgggaatgcatggtgcttaaatcgccaatttttgcaattccgctggtctaaaacctgagaagctttctaggccatccgcttctaaaacgggaacggcttggaaaccttgttccttcaagtaatcaatatattgtggttcgtcattgatgttatgttcaacaaaaggaacgttgtgcgtttctaaaaagtgtttcgtcatccggcattgtgggcagccgttcttagtatataatgtgatatttgccataatcgttaactcccttgtatttctcttatcgataaaaatagtataccgttttgaaatggaagatgcaatcaataaacaccacatattgtagataaaacaaaaaacgaccactaattatagtggtcgtttacgaatgttcatttgattgtcttgggcaacgtcctgtacttaagttaaacatatttatgggtaaagtcaatccctgctaatgcgcaaaatttttcaaaagcacgccggacaaagcttaacagattttaaaaaattttttagattgggattaatttaatattgcaccatcataaaaatgagttaacgaacattttataaaattggtgaaagtaaccgtgaaaatttttgtttaaatttcaaccaagttgactgttgggcgattatttcgtctgttagtagggatgctttttccatatcagcctgatagatcgcttcaagttgcgctgcaactttcggatcgtaaataaacgtattggcttcaaagttcagcttgaaactacggatatccatattggcagaacctacagtgctgatatgcccatccatgaccgccgtcttagcatgtaagaatccatcttcataccggtaaatcttaacgccagctgcatgcaagagttgactgtagtattctgttgcacggtagatgaaggggtgatccggcatgttaggcgtcatgatacgaacatccaccccggacattgccgcagtcgtcaacgcatcaataatactatcatccggaactagatagggcgtttgaatccataaacgcttcttagcggtactaatcatcttcagataaccgagtttgatttgttcatctaatttatcgggaccacttgagacaatttgcatggctgctgatccacgattttgggattggtccactgggaagagttcttccgagtaagttaacttaatcgcagactcaacactcgcgttccagtccatcataaagcgtacttgtaaggctaacacggcattgccggtaatccgcatatgggtatcacgccaatgtccgaatttcttactccggcctagatattgatcaccaacgttaaagccaccaatataaccaatcttaccgtcaattaccacaatcttacggtgatcacggaagttcaagcgaaaatcggtaatcgtgtgttttgaactgaagaacgttcgcgcgtggccaccgacatcttcaagtgcgcgccaccatttttgcgttgcgccttgggagccccaagcatcgtagacaacgttgactgaaacgccttctttggctttttgaatcaatagttgttgtaactcattgcccaatcggtcattatagatcgtataatattcgatatgaatacttttttgagcttgtttgatgtcggcaaagagggcgtcaaactttgcttgcccgtcagtatagattttgacatggttattctttaaaacgggtgcattattaatatttaaaaagagattcaccatttcggatgcttcactggaaagcatctttttcggtaagaggtcgtttttacgattttccttacgttgaatgtcgaccaatgcggaaagcccatcatcgatttgcgattgactttggaaaatctttttccgcgataagccccgtccggtaaacatatataggataaaaccgcccacgggtagtaaaattaagactagcagccacgcccaggtggccgcaatatcgcggggctgtctcagaattgtaataattgccaataaggcattaatgaagatgatgaatgacattatttctgtaactaaaaccatatcgtactcctccaaaattctagcgttgcttattattttactaaaatcacgctcaaagcgctagttaagcctatcaacagtcagttaaatgaggtaatccctgttgggccagatggtgcgccccctgattctgacgctctggaatccattggtggatgaccattgaatagggcgcctcaagtgctagaatccggtcgacggcagcttgataatgtttagcataccgcttttctaggctctgaaagacaagcttgctgtcaacgttaatctgtagtattttcgtggtaagcccccgattggctagttgttctaagccaagaatgaccgccgaaaattctgcatcatgattggactgttctggcaaaggtgcttgtagttgatattgtcgctctggtgtcacgattaaaattcccgccgcacttggtccgggattgccacgagttgctgcgtccgtataaagtttaatcattcttaaaatttaccgcctttcactgacagcagggtcaggttaatggtatgatacaaagcgtaaaaaggagtgttctcatgcaaaagacaaccaccgcattctaccaaccaaattatgcttacttcgtgacgatttggtcttggattggcttcgtctatacattagctttaattgtacaacttgaactcatcaacttaaactggcaatcgtggggcatcggcttaattgccgtttggttgacgctatgggtcattttcgggcatcgtgtttcaatgacggcagacgtgatcacgcttaaacggccggtatttaaatataatcgaaccatcaaccgtgaaacgactacgaccattattgtccaaaaacatggtttattaattaaaaccaacgaacttgattaccaacccgaacaaatactccttagtcgcaaagccaagcaggcattcgttgaacaactgaaacaaaatggttggccaattgaagaatagttaaataaaaaagagccacgacaaacattaatcttgtcgtggctcttttttagcgtttaaacgtatttttattctgctatcttttgcacgttagctgcctgcaaaccgcgggcgccttctttaatctcaaataataccggctcgtctttattcaatgatttatagccgtcagtttggattgcggtaaaatggacgaaaacctcctcgtcatctccataactgatgaagccataacctttagcattgctaaaccacttaacgattcctcgttccatcacaatccctccttgaaatgttaatcagcgtacgcgctcattttaccacgtacaaagaagtgtgtcgaagaatatcgttctttttaagcatcccatctgccaattccgtacgtaatcagctatactaggtagtatcataaataaaaaggagctgggcggtatgtcagatattcaaatagcacaggaaaatgaagctaaggagatgcagccaatcacggcaattgccgaacaagctggtttaacggccgctgatttagaacaatatggaccgtataaagcgaaggttaatttcgctgccattaatcgattgaaagaaaaagaagatggcaaactcatcttagtgacctcaatcaatcccacaccagctggagaaggtaaatcaaccgtgactgtcggtcttggcgacgcccttcgtcaactagatcaatcagccgtcattgctttacgtgaaccttcactaggccccgtcatggggatgaaaggtggcgcaactggtgggggctatgcccaagtggtaccaatggcagatattaacttacattttacaggggatatgcacgcattgaccgctgctgtgaatactttagccgccctaatcgataaccatctgcaacagggaaatgccctcaacattgatccccgccgaattatttggaaacgggcgcttgatattaatgatcgtgcattacgccaagttgtcattggacttggtggtccagtgcaagggatgccgcgccaagatggttttgacattaccgttgctagcgaattaatggccattctctgcttagcaactgacattactgacttgaagcggcgcattagccaaatcgtcattggttacacttatgatcggcaacccgtcacagttggcgagctcgaaatcaccggtgcaatcgcgatgcttttaaaagatgccctcaaaccaaacctcgtccaaacgcttgaacatacaccagccttaattcacggtggaccatttgccaatatcgcccacggctgtaacagtattttagcaacccaaacggccctaaaaatgggtgatattgcgattactgaagctggcttcggcgctgacttaggtgctgaaaagttcctagacatcaaagtcccacaacttggcaagactccggataccatcgtgattgttgccactgttcgggcgttaaaatacaacggtggtgttgctttagctgatctaaccactgaaaatctcggtgcgttagacaaagggtttagtaacttagccaaacatattgctaatatgcaacgttacggcattcccgtagtcgttgccatcaatgagtttacaagtgataccgaagcagaggttacaatgctccaagaaaaatgtgctgaactgggtgtcaaagccgttttagctagtgtttgggcacatggtggtaaaggtggccttgatttagcccaggccgtcttagaagcactcgatcaacctaaaaacttccaaccattatatgattcaaacgccgacattcaatcgaaactaaccacaattgtcactgacatctatggcggtaaagaggttgttttcgagggcaaagctatcaaccaactgaaagaaatcgaaaaaaatggctgggaccacttaccagtctgtatcgccaaaacacaatattcactctcagacgatccaaaagcattaggcgcaccaactgatttcaccgttcacgtccgtgaattgattccaaagcttggcgcaggcttcatcgtcgcaatgaccggcacagtcctcaccatgccaggtctaccaaagaaaccagccgccctcaacatggacgtcacagaagatggcctgattagcggattattctagagtgcgtttgaaacggttagcttctgagcattaatagaatttgacgaattgccgatacaatcggcgatttggcaaatttggttaagcgcagaaagttagcttgaaaagcacgttttccaatatcctaacgcccatctcgaaaactgattgacaagtcagccgattttaaggacaatggtagattgtatgaataggaggttcccatgctcatctatatcgttttagccgcagtcattgtactcggtgaccaacttttaaaaagctggattgttgcccatgttgcctttgcagcaacccaacccgttattccgaacgtactgagtttaacgtatgttcaaaacgatggggctgcgtggagtatcttggccggtcaacagtggtttttctacctcgtcaccattgtggccctcggggtaattggctacttattttatacctctgatcgcactgaaaaattttaccggatcggtttaacgttgctgttagccggaacacttggtaacttcatcgatcggctccaccttaagtacgtcgtagacatgttccaaatcgaatttattaatttccccatctttaacgttgcggatgttgccttaacagtaggcgtcatctgcgtctttattgctattttgttgaaagagaaagtgactcatgactgaaactaaacaattaacgattacaactgaaacaggccggattgataaggcgctcacccaattactacccgattactcacgttcacaaatccagcaatggttgaaaaaagacttggtgcaagtcaatgatcaaccttgtaagagtaaccgcaaagtcgtaacaggggatgtcgtcaccgtcaatattccagaccctgtcacgctcgacttaaccccagaagatattccgctcgatatcgtctatgaagacgatcaagtcctcgtagtcaataaaccacaagggatggtggttcatccatcagctggccacccgaatgggacattggtcaacgctttattggcgcacaccccattgtctgaaatcaacggcgtcttccggccggggattgtccatcgaattgataaagatacctctggtcttttgatggtggctaaaaccaacgaagcccacgaatctttatccgcccaactcaaagctaaggaaaacttacgtgaatatatcgcgctagtccacggcaacatcgaagaagacgaggggaccattgatgcacccattggtcgttcaaaagtcgaccggatgaaacaagcaatcgtcgaagatggccgcccagcggtcacgcattttacggtcatggaacggtttgaagacttcacattaatcaaatgtcgactagaaactgggcgcacccatcaaattcgcgttcacttagcctatattaaccggccagttgctggcgatcccgtttatggtccccgcaaaactttagctgggcatggtcagttcttacatgctgctgtattaggctttaagcacccaacgacgggcgaaatgatgcgctttgaagccccattacccgcaatcttcgagaaaactttaaccgaattacgtgaaaatcattgacaaatcaaggattctccgttaagctaggtctaacttaatagaagcctttaaaatcggtcccgtgaggccgagaaggtacggtgaaagcaccactagacgcggagtccctaactgtaacctctcgaccttatcggtttgagaggttttttgtttggaaggagtctttacgatggtcaaagaagtggtcgacagtaacacaatgaaacgggtctttactcggattacgtacgaaattatcgaacagaataaggggatttcagatctcgtcctcgtcggcattaaaacccgtggcgtgtttattgcccaacggattgcagaacgcctcgaacaattagaaggcatcgcattgcccgtcggtacactagacattacgttataccgcgatgatcaacatgatcttgatacacaaaatgaaccacagattaacgggagcgatattcccgttgatatcacaaataagcatgtcatcttaatcgacgatgtgctttacacagggcggacgattcgggccgcgcttgacgccttaatggacttaggccggccaaagaaaatttcattggctgtcttagtcgatcgtggtcatcgtgaattaccaattcgccccgattttgtcggtaaaaatattccaaccgcgctcaacgaacaaattcgcgttgcgatggaagaaattgatcaacatgatgggattaccatcgaaaaactaactaaataacgactgaaccgtttaattgtctccagagagagcaaaagggtttgtcttgaacttagtgcgcctaaaaaaaggggcctaagtccgtcaagggacacacctaccaatctgttggagcgtgtgtctttttttggttcaaaaagtcgtcgacatggaggaaatacttatggctacacaatttagaaatcccgatgcggtcttagacgtcaacgaacgacccagcaccggtaaatggattggtttatccattcaacatatgtttgcaatgtttggctcaaccgtcctagtgccaatcttagtcggtttaaacccagggattgcgttattcagttccggggtcggcactttaatgtacctcttgattaccaaaggcaagattccagcatacatggggtcgagtttctcattcatcgtgccaatgctcgctttaatgaaaacgactggctatcctgggattgcacaagggacaatggcggttggggcagtctacttaatcgtttcaatcttagtcagtctgattggttccgactggatcgacaaagccttaccacccattgttgtcggcccaatcgtgatggtgattggcttatcactcgctggcacagctgccaaacaagccactatcaatgcccacgggaattacgacttaaaattcttcgcagtcgctttactaacgttgttaatcaccatcggctttaatatgtatctcaaaggattcatgagcttagtccccatcttgctcggcatcattgctggctacatcatcgccgtcttgttcgggatcgtcgattttcaacccgtgatggacgccccttggtttaaagtaccagacttccaagtcccatttgtcacttacaaacccggtctgtactggggcgcgattctcagcatggcaccaattgcctttgtcacaatgaccgaacacatgggccacattatggtcttaaacaaactcaccaagcgtaacttctttaaagatcctggtcttcaccgcacgttagccggggacgggacagcctcaatcatcgccgcttttgtcggaggaccgcccgtcacaagttatggtgaaaacatcggtgtcctcgccatcaccaaagtccacagtgtctgggtcttaggtggcgccgcattcttcgccatgatcttcggcttcatcggcaaactgagcgcgttgattcaaagcatccccacacccgtaattggtgggattagcttcttactcttcggggtcatcgcctcaagcggtttgcgcgtcttaatcgacaaacaagtcgattttgataagaaacgcaacttaatgattggttcatcaatcctcgtcatcgggattggcaatgcctacttacaattaggccaataccaattctcagggctagccatcgccaccgtccttgggattgtcttaaaccttgttttaccggataaagcaaagagcgaacttgaattggaggctcaacaaaatgcaaaagcataacgcgttggtttccgttgatcaactcaccaatgatttagtcgcaggtctcatcaaccgcgctagcgcctttaaaaagggcgcgacaagcaaattaactcggccggtctacgcaatgaacctattctttgaaaatagcacacggacccatacgagtttcgaaatggcagaacgcaaactcggcatgaccgtcttagacttcaatgccgatacgagttcgacttccaaaggcgagaccctcagcgatacgctcaaaacggtacaagccattggcgtcgatttcgttgctgtccgccattctcagaataattattacgacgccttactcgcagatgatcaattccacatggcactggccaatgcgggcgatgggagtgggcaacacccatcccaatgcttactcgatttaatgacgattcacgaagagttcggccactttgtaggcttaaaagtcgtcatctgtggtgacttgcgtcattcccgggtggcacggtcaaatatgcaactgctcaaacaactcggcgcaacattgtattttgccggccctgaggaatggttcgcccctgaatttgcccaatacggacaaccagcccaactcgatgacgtcttaccagaagttgacgtcgtcatgttactccggattcaacacgaacgctttgctgccgatgaaaccttatctgacactgcattccatactcagtacggtttgacaactgagcgggcagcacaccttaagtccagtgctatctggttgcacccagcacccgtcaatcgtgacgttgaaattgccgacgaactcgttgaagccccacaatcgcgaatttttaaacaaatgaccaacggcgtttttatgcggatggccatcattgaacacctattagaccaacaacatctgattcaacattaagagggggatctgctatgtatcaattgatcaaaaacggccaagtcttgattgacggccaactgcaaaaacgcgacatcgccatcgatgcaaccggtcagattacggcaattgaaccaacgattaccgcagtcccaaccgacccagaaacgatttatgacgcacacggccatttcgtcagtgccggcttaatcgacggacacgtccacttcagagatccaggcttcacgacaaaagaaacactcaaaacagggagcgcagcggttgcccacggtggttttactagcgtaattgcaatgccgaacttaaagcccgtacctgataacttgctagatttcaagacactggttgcacgcaatcaggcagaaaccagcgtccacacatatcaatttgcaccgattaccaatgagttaactgaacaaacaattgtcgacatgtcggcgtttaaggcagctggtgcagcaggctttaccaacgatggtcatggggtacaaacggcacaaacaatgtaccaagcgatgcagatggccgcccagattaacatgcccatcgtcgcgcacgtcgaagatgaatcactcgtcaatggcggcgtcattcacgacggtcaagccgctaaaaaactaggcgttcccggaattgcgagtgtcagtgaatccgcccaagtcgcccgggatatcgagctagcgcgggcgaccggcgttcattatcatatctgccacatctcaactaaggaaaccgtcaatctcgttcgccgcgcaaaacaagatggcctcaacgtcacttgcgaagtcaccccacatcatttgttactcgatgattcagcgattaccagtgacaacgcaatgctcaaaatgaatccgccacttcgaacacttgcagatcgccaagcactctgggcgggcttaatggatgggacgattgatattattgcgaccgatcacgcaccgcataccacagaagagaaacaacaggcgttattgaaagcgccatttggtatagtagggagtgaaacagcctttagcttgctatacacgcatttagttgccaacggtccatttagtctcgcgcaactgacaagctggctaacaaccaacccggcccatgttttcaacttaccacacgccggccagttagcggttggccaaccagctgaccttgctgtttttaatttaacggataccaccacaatcgacgcaaacactttcttatcgaaaggccacaacacgccatttatcggcgaagcagtgcaaggtgatactttattaaccttggttgctggtcagattgcatatcaaaaggagtgtgtcatcaacgggtaacttctgagcatttacctgacttggcggattggtgttgcagacaccgatttgacaagtgtcgtaaaggacaagaagttgttgatgaaagcacgttcaaaaaaggagtgaactaaaagatgaaacgttaccttattttagaagatggcaccatcttccccggcaccggttttggcgccccaattatctcgacaggcgaaatcgtctttaacaccgggatgagtgggtaccaagaaaccattactgatcaatcatacaacggccaaatcatcgcttttacataccctttaatcggtaattacggggtcaaccgcgacgactttgaatcgattaaaccaacctgtaaaggagttgtcgcccatgaaacaccacgcctagcaaataactggcggatgaatatgagtcttgatgactttttaaagcaaaagaaaattcctgggattgccggcatcgatacgcgggcactcactcgccgtctgcgcgataaagggaccatgaaagccagcatcgttgatgccgcagacgatcacgcgttcgatcaactcaaggcattggtcttaccaaaaaaccaagtccaacaagtctcaacggccaaaccttatccgagtcctgctaacgggcggaacatcgtcgtgattgactttggcttaaaacatagtatccttcgtgaactgtcaaaacgcgactgtaacatcactgtcttaccatacaacacaacagctgaagaaattctgagtctcgatccagacggcgtcatgttaaccaacggccctggtgatccagaagatgtgccagaagccattgaaatgatcaaagggattcaaggtaaagtgccgattttcgggatttgtctcggtcaccaactttttgccctcgccaatggggctaaaacctacaagatgaagttcggccaccgtggtttcaaccatccggtccgagaagttgccaccaaacggatcgacttcacatctcaaaatcatgggtacgccgtggatgccgactccatcgacccacaaaaccttctgattacacacgttgaaattaacgatcaaacagtcgaaggtctccgtcatagacaatatccggccttttccgttcaattccatccagacgcagcccctggtccacacgacgctgcacatctattcgatgaatttatcgacatgatcgatgacttcaatcgccgccaaaaatagtaaagaggggatttagtgatgccaaaacgtaccgatattcataaaattttagtgattggctctggcccaatcgtaattggtcaagccgccgagtttgattactcaggcactcaagcctgcttagcgcttaaagaagaaggctaccaagtcgttttaattaactcaaatcctgcgacaatcatgactgataaagccgttgctgatacggtttatatcgaaccgatcacgattgactttgtcacgcaaattctacgcaaagaactcccagatgccatcttaccaaccctcggcggccaaaccggattaaatatggctttggaactggcaaacaacgggattctcgccgagctgaacattgaattgctcggtaccaagctcagcgcgattgatcaagctgaagaccgcgaactgtttaaaaacttgatgaatcagttaaacgaaccgattccagaatctgcgattgcccattcactcgttgaagcccaaacattcgttaacgaaaacgggtatccggtcattatccgtccagcctttacccttggtggcactggtggcgggattgccgaaaatgccggtgaactgagcacaattgtcaaaaacgggcttagcctatctccagtcggacaagtcctcgttgaacaaagtattgccggtttcaaggaaatcgaattcgaagtcatgcgcgacaaaaatgacaacgcgctagtcgtctgcaacatggaaaacttcgacccagtcgggattcatactggcgattccatcgtatttgcacccgttcaaaccttaagtgaccgtgaagtccaagcattgcgcgatgccgcacttaaaatcattcgcgccttgaagattgaagggggctgtaacgttcaactcgcccttgatcctaatagcgaccgctactacattatcgaagtcaatccacgggtgagtcgttcatcagcccttgcttctaaagcaactggctatccaattgcaaaaatggcggctaaaatcgccatcggtttaacacttgatgaaattcataatccaatcaccgggacaacctatgcgcaatttgaaccgatgctcgattacgtcgttgcgaagattccccgttggccatttgataaattcaacaaaggtgatcggcaactcggcacccaaatgaaggccaccggtgaagtgatggccattggacgcaacattgaagaagcattactcaaagccgttcgctcacttgaaattggtactgaccatctcgaaattccagcattgacggcagtcggtgataacgaccttgtccaacggattgtacatccccaagacgaccgacttttctaccttgccgaagcattgcgccgcggttattcaattcaagaacttagtgaattgacaaaaattgatcttttcttcctggataaactcagccacattgttgaaattgaagaacaactccggaccgataaaggtgacttagaattactcgaactcgccaagaaaaatggctttgccgacgctaaaattgccgcaacttggcaaatcatgcctgcccaagtccgccaaatgcgccaagaaagtggcattcagccagtttataagatggtcgatacttgtgcagccgaattcgaatcacaaacaccttattactacgcgacttacgaacaagaaaacgaaagcattgtcagcacaaagccttcaatcttagtgattggttccggtccaattcggattgggcagggggttgaattcgattatgcaaccgtccactgtgtgcaagccatccaaaaggcgggctacgaagcaattatcatgaacagtaatccagaaacagtttcgactgacttttcaatttcagataaattgtacttcgaaccactgacactagaagatgtcctcaacgtcgttgaactcgaaaaaccagaaggggtgattgtgcaattcggggggcaaacagccatcaaccttgccgaaccactgaccgaaaatggtgtgcagattctcgggacaagcgtcgcgaacttaaaccgcgctgaagaccgtgaccaattcgatcaattaatcgccgaactcgacattccacaaccagtcggggcaaccgcaaccaatacgccagatgcgttgaagattgctgaagagattggttatccggtcttaatccgacctagtttcgttttaggcgggcgggcaatggaaatcgttcatactgcagaagaccttacacattacatgaaagaggccgttaaagtttcagtcgaccaaccggtcctaattgaccgctacttaatgggcaaagaatgcgaagtcgatgccatctgtgacggcaaagatgtcttaattccgggaattatggaacatatcgaacgcgctggtgttcattcgggcgattcaatggcggtttatccaccacaaaatctgacggatgcggaaaaacaagccatcatcacttacacgaccaagctctgtttagcacttgaatgtcgcggcttgttaaacatccaattcattatccaaaatgaagcagtctacgtgattgaagtcaatccacgggctagtcggaccgttccattcttgagtaaagtcaccggcatctcgatggcgcaactggccacccaagtcattttaggcagcacactagctgaattaaagagcccaaccggtctattaccagcgggcccactaattcatattaaagcacctgtcttctcattctcgaaactcacgcgggttgatagcttactcgggccagaaatgaaatcgaccggggaagtcatgggaactgacgtaacgatgcaaaaagcactctataaagcgttcgaagctagtgggatgcacttaccaagtcacgggaacgtcttaatgacaattactaaccaagataagacacaagcgctcgaattagcaaaacgcttccgcgaagttggctatcaaatcattgccacgcctgggactagtcaagaattccaagcagcaggtgtgccagtgcaatccgttgccaagattaatgctacgagcggcgatttacttgataaaatcaaagccggccacattcaactggtcatcaacacaaccggcttgaacgaagccccacaagtcgctaaagacagcatcgtcattcgccaaaccgccattgaacacggcattccattgatgacctcattggataccgctgatgcgatcttagcggtcctagaatctcaatcgctcctgaccaaaccactttaaaaccactaaaagagtctgaagccctttgcctaaggctcttttattacataaaaatcagaaggaggctgctaaatgttgccattagaataccaattaaccctcactaagcaaaccgaaattgcccccagtatctatgaattatgcctcaccggagacctcgcacagcaacccattgcaccgggacaatttgtcgatatcaaaatccccagtgacgcccttttattacgtcggccatttgggattgccaatgtcgaccgccaaactaacacgattaccttgttataccgcgttgttggtggaggcaccacgatcttaagtgaatcaccggtgggcacaagcttgtccgtcttagggcctcttggtaacggttatccaattgaccaattagtagccggacaaaacgcgctaatcattggtggcgggactgggattccaccattacatgaactctcacggcaacttaatgcaaaaggcgttcacgttcaacacgtgttcggctttgcaactaaagcagccattttctatgaagatcactttcgcaagctcgggccagtcgcttatgcgacaaatgatggctcgtacggctaccaaggccatgttggtttattactcgatgcacagtttgctgatgcgacaacccgatatgatgccatttacgcatgcggaccaaaaggcttgttaatggccgtcgataatcgattcagtgagcatcccaatgcctatatctcattggaagaacggatggcttgtgggattggtgcctgctacgcctgtgtcaccaaactcaaacgtgatccaagcattcagctcaaaatttgcgatgacggacccgtcttcaaaacgaacgaggtgctcatttaatgacagacttagcagtaactttaccaggcttagctttaaaaaatccgattatgcccgcctccgggtgttttggcttcggtcaggaatacggtcgctattatgacctcaacgaacttggcgcaattattatcaaagcggcaacgaaagaaccccgacttggcaatgcgacaccacgggttgctgaaagcccaagtgggatgttgaacgcgattggcttacaaaatcccgggattgaagtcattatgcaagaaaaattaccctggttagccgagcattatcccgagttaccaatcatctccaatgtcgccggcaataccgaagctgattacgtcgctgtctgtgaacaaatcagccaagcgcccaacgtccatgccatcgaactgaatatctcgtgcccaaacgtggcccatggcggtcttgaatttggcacatcaccagaagccgctgccacgttgacgaaggcctgtgttgcagtcagccaagtgccggtttacgtgaagctctcaccaaacgtgacggatattcgtccgattgcgcaagcagttgaagcagcgggggcagccggcttctcattaatcaatacactggtggggatgcggattgatccaaaaacacgccaaccaattctcgctaatcaaacaggcggcttatctggaccagcgataaaacccgttgccatccggctcattcatcaagtccgttcaatttcgaaattaccgattattggaatgggcggtgtctcaacagctgcggatgcacttgaattaatggccgccggcgccaatgccatcgcagtcggcactgctaatttcagcgatccatttgcctgtccaaaactaatcgccgcattaccagatgaactcgctaaatatcaactaaccgatttaaaatcattcggtctaccacaggagggcactcatgactaaccctttaattatcgcgctcgactttccaaactgggaaacaacagatcgttttttagtgcaatttccaactgatgaatccttattcgttaaagtcggcatggaacttttttaccaagagggaccacagctgattaaaacgttaaaagcgcgcggctatcagatttttctcgacctaaaactctatgacattccaaacaccgttcaaagcgcgatgactgttatcggccaactcggtgtcgattacacaacgattcacgcagctggtgggcaggcaatgctcaaagcaggggcggctggtctgaaaaaaggcgccgcacttggcaacgtgcggcccgctaaactactagcgattacgcagcttacgtcgaccagcgaagcgcaaatgcaaaccgaacaactcgttaatgtcagcctaccagaatctgtcgcacactatgcgcaactcgcacagaactcggattgcgatggcgtggtctgttctgctcaagaggtgccaacgattcgcgaacacaccaatgctgattttctctgcgtcacacctgggattcggccagcaacaagccaaaccaatgatcaaaaacgggctgtaacaccacacgaagccgcacaagctgagagctcggcgattgtcgttgggcgcccaattacgcaagctacaaatccatatcaagcttaccaagctatcaaatcagaatgggagtctttcaaatgacaacaattgcacaccaagtcgcacaagccttaatcgatattcatgccgtcagtctcagtcctaacaacccttttacttgggcgagtgggctaagaagtcccatctattgcgataaccgtttaacgattggttatccaaaagtccgcaagctcattgccagcaacttagctgcggcaatcaaagcgcaattcccagacgttgaagtcatcggcggaacagcaaccgcggggattccccatgctgcatgggtcgcagccgaactcgacttaccgatggtttacattcggtcgaaaccgaaagatcacggtcaaggccgtcaaatcgaaggaccgtttaaagccggtcaaaaattagtcctcattgacgatttaatttcaaccggcgggagtgtcttacaagcagcggccgccgctcaaaaagagggcgcagaagtccttggtatttttggcatcttttcatacgaactagcagccggccaacagaatttcgcaactgctaacttaccactaacgaccttatcgaatttctccgccttattagcggtcgaagaagccgctgataacttaactccagaacaagccacatcactcaatgaatggcgccaagacccacaagcatggtcagacgcccattagaatagagtgttaaccggaaagtaatggcttgcagaacacgtttagcgtgtgccatcagccgcaccaatcaaagaagcgttaccccaattcactttggagtaacgctttttattagtcttgcacaggtttgttacgtagcttttgaacgagttgctcgtctggtgtcgtataaagtgtttgttgcccttcgtaaatcacaaaccctggtcgcgcaccgttcggttttttaatcttcttaacctgaatataatcaactggcacggccgctgataagcgcgccttcgagaagtaggccgctaagttgccggcttcttgaagcgtatcttctgatggatctgggctatcaataatcacatgagacccgggaatgttcttcacatgcaaccagatatcagttttatgggcttttttcaaggttaattgatcattttgatagttattcttgccaacgaaaatccgggtaccatcactcgcatagaaaacttcaggttcactaatcttgtaacgtttctgcttcttggcaccggttttcttagcctttaaataaccttcagcctgtaattcagctttgatatcctctaaatctttgggttcagcaatttcaatttgcgccataatcgtgttgaagtaggcaagttctgcttcggtctttgccatttgttcattgacgtaggcaattgaattccggagcttctgatatttcgagaaatacttctgcgcattttttgaagggctaatctggttcgacaaggtaatcttaagcggttcgttattgtcgtagaaattgggcaacgtgacttcagccatgccacgttcgacttcccgcaaataggtggtcaaaatttcacccttaatccggtaatcatcagcactgtcggctgcttttaacgttttttgtagttttttcagtttcttttcatccttttgaatctcgttgcggatgaagtggatgagcgcactaccttgttgctgcactcggtcacgctgcgccttgtgtaagtaatattggtctaacagctcactcaacgtgtcaaaatggctcagtgtccctgtcaggctctcataagggaaggccgtgaaccacgacttcttttcaccaactgttaacgttggtgtcacttggtcgaattgcttgaagaaatcagtcacaaccgccaaataattgtcatgatccattaaacgggtttgtagttcaacggcactttcacgactcatcccttggaagtgttgttgtaaccatttgacttgttcatcagcagcttcgttataataacttaaccaatcaagcgtctttaaatcagtcgtaaaaccatcaaccccggttgcagccggtggactaacataatcggcaccaggcattaagaaccgataacggttttgcgaaacaccgacgtgccggattaaatcgagaatcttattggtcgcttgattaatcaaaatcacattactatggcggcccatcaattcaacgattaagcatagttgttgtaagtcccccagttcattccgtgatttaaatgtgaatcttagaatccgatcactttcaatttgcttgatgttttctaaaatggcgccatctaaatacttccgtaaagacatcgcgaagttcggtggcgttgcggggtttgcataaggcacccgcgtcacttgcactcgcgcataagatgggtgggctgataggagaaggggataggtcttacgatttgcccgaatcgttaagattacttcgtttggataaggttgttgaattttcgtaattttgccgtctgctaaagttgtatttagctcatttacaacggcgtgggtcattaaaccatcaaaggtcattattgctcacactctctataattgaattgtcttacttattgtaacggttttgcagtggaacctcaaagaaattagttgtttgcaatcgctaacacgactattgtataatacaattatcaaattgctttatacaattaaagggggatttaccgtgcgctcaaccttagcaacgtttaatcaactgaatctattgtatcaagaacaaaagaaacactgggcgctacgactcgacttgaagttagcccaagtcaatattctaatggccattgaacccgatcaagaacgcatttcgcacgcagaattaaccacgttaaccaaactcgatgcatcgacactcagtcggcagttaaatacgatggctcaagaagggctgttaacaaaagtgaccggggctgatccgcgccaacgcgtttacgcattaacaccgaccgccaaaacggcattaagtacgttgcaacaacttcaaactgaacttgaaaatcacattcaacaaaactggagtaccgatgaacagcaacttttaaaaatcctactgaaccgttattatcaaagctttaatcgaccattaaaatgagacgccctatacatttttcggaaaatcggcatttttaggggaattaacctaccatttatgatatagttattaccgaataataaaaaagtaggtgtcaccatgaaaattgctgtagtcactgatagtaccgcttatctcacagaacagcaagtgaaagaccatcatctcttcgtcgtacctattccggttatccttgatggccaggtctatgatgaaggcgttgatataaccactgaagagttctatcaaaaattaaaaacatccgaaacattccccagtacatcacaaccaccactgggtgaaatgttaaaactatacgaagacctcggcaacgaagggtatgatgctgtcatcagcatccaccttgctagtaccatctctgggtttgtcacgacattgaaaaatgcggcaagcaccatcgataacatccaggttgtcccatacgattcagggattactgtgatgttaatgggctacttagcaatggaagcggccagaatggcacgcgacccagaagtgaccgtcgaccagattatcgcacgccttgacgatctaaaaagcacaatggatgaatgtttcattgttaacgacttacaaaacttagtgcgtggtggtcgtttatcaaacgcatctgcttttattggtagcatgttgaagattaaaccgcttttaacgtttgacgctgacactaacaaaattacggcatttgagaaggttcgttcattgaagaaggcttacgcccgcgctgaacaaatttttgctgaaacagccgaacgtgttgactatccattacgcgcactaatcattcacgctaacgatgaaccagcagcgattgcatggcgtgataagcttcaagcaaactatccagacttaccaattgatatcagctactttggcccagttatcgggacccatcttggtgaaaaagccattgcacttgcttggattaaagattttgataaagcctaatttaaaagcctgtcgaacaattcgacaggctttttttgtgacttataagatagaaatgggttcttctaaggtaaccaacttcgtcccaattagcttataaataacggatttaacggctactttttgaacaatgttgagcggttcctcgtttaaattgaattcattaaccgttgattgcgcgttaatattcgcaatttcggcattaaataaccgcacaaactgatcatatgccttaccagcggtgtcgtttgccaacgattgcgaaatcccttgtttaatgacatcgagcgggaagactaatttcataatactgaccacaatcaattcggctaaatgatcccgattatagcgtttcttttccggtcgttcaataatcgccattttgacatagctattaatcattgttttcgttattttaacgtccaacaaaggactcagtcgtttattgacctcactaatgacttggtccatatagaggtctaaatctggaaattcagaccataatggtaaccgcaattgttgaaagtcacccaaccatttttcaaattcttgtgattgcatactgattaacgccaccaatctgttgatagtatatttattatgccatagcaattatcatttgtcactaacatagaatcgaattctattatctattgacttataatctacattcgcgctataatactcggcaaatagagaaaaagaggcgagaaccatgcaactttccacgattaaacgacaacaactgatttatgaaatatggaatgccattacccacgggattggttttttcggtagtttaacgttagtcatcatgctcctggtcaaaagcattcataaaacactctcaccagtcgcgattgctagtctagcagtgtatggcgccacattactgctactgtatctcgcttcgactttatttcactgcttagcatttaccaaggccaagcgcgtgtttcaaatattcgaccatagcaatattttcttgctgattgctggtacctacacgccatattgtttgatttttattggccatgcaacaggaattagcttactgattgcaatctggacactagcgattgccggtattataacgcacattttgagccacggtcggtaccaaaagattgaaacaacgatttacgttgtgatggggtggttatgtttattagctggtaagaccctttatgtcaacctcagtccagttggtttttggctgttagtcagtggtggcgtagtctttaccgttggcgctctaatttatagttttcctaaaattcctggcttacatttgatttggcactttttcgtaatgctcggaacgaccctgatgtttttttcaatttacctcaacatttaacttgaaggagtacaactcatatgacaattaaaattgtaacggactcatcgattcaactgacagcagacgaacgcgccaaatatgacattcacatcgtccccttaacgattcaacaaggaaatgagtctttcattgatggacaaaccattacccgcgctgaatttttaagtcgcttacaaaatgcaacgaccgattttccaacaacaagtcagccaactgtcggcagtttcgtcgatttatatgatcaattaggggctgatggtagtacgattctatcgattcattgtaccggcttgttaagtggcacaatcgaaggggcacacacagcagcccaccaatcaacaagtgacgtacacgtgattgatagtaaagcaatcgaccgtggacttgcttatcaagtggttgctgccgcccaagacgttgaagcagggaagcctcttgatgatattatcgcgcatctcgatgacatccgtcgtaaaaccgaaacctacgtctttttagattcacttgacgcgcttcaacgcggtggtcgaattagtagaatggccgggctattaacgaaaatcattaaacttaaggtaattgtgcgcttaacagatacggaattagaagtcgtcgcaaaggggcggggactaaaagcttttacaaaagaaatcaacaatatccgtgaatacttagccacccaagacgttgcggaaatcggcatctcacacgtcggaatcacggatgaactatccgctaagatccaagcaacgcttgaagaaacacagccccatgtgccttatacagtcgcactaaccagcccggtcattatgagtcacgttggcctaggggcgtttggtattttctatcggacaaaataacagctgacaagaacgtctcattcgaggcgttcttttttattgccccttaaaattgcgcaaaatctagttgcgttatttcaaagaatcgtttatattagaatgaacgttctaataagagaggagcatccagatgcggacaaaaacatttgaagcaccggttgtcttagacaaagccatgcttgtcttttggcaacaaggctatgagaatacctcaatgcaaaacctagttgatgcaatggggattcaccggcgcagtatttacgatacattcggcgataaacatgaactgtttatccaagtactagcacattatcgtgaccaaattaacgagcgtttcgagcaagtactggcaacacataccgatttaaggtcgcgcttaacagccatttttgaaatatttattgaccatccggataaccaaccagccggctgcttagtggtgaataccgcggcaacgttaaattcattagaaccagacatccaaacgctgattcagcattatttaacccaagaaaaagcactgttgcaggcattactgattgccggccaggccgaactagaaccgtctgttgcaattgatcttttagctgcatcgcttcaaagtgcgctcattggtatccgggtcatggctaaagtgaacccagattcaactacgctaacagcaattgtgcaacaaaccctacaaacactcccgtggaaagaggttttctaatatgaaagcagctcaaattaaaaaatataatcaaacactagctgtcacgattcaagaaattgatcgcccacaaccgctagccaatgaagtactcgtcaaagtcgcctatgcagcggtgaatccattggatccaatgaatatccgcggcgatactaaattaatgcaaaactatgctttaccactgactttaggcaatgaaattgccggtgaaatcacagcgattggaacagacgtcactgatttcaaagtcggggatcaagtctatgcgcgtttaccattggctaaaatcggtggctttgctgaatatgtcgcggttaccaccgatgcaatctggtacacgccaaaggatttatcgctacgtgaagccgttgcaatcccactgactggcttaacggcttatcaggggctatttgaggaattggcagcccaaccgaaccgaacgctgtttatccctggtggttcaggcggtttcggtccaatagccgtcccaatcgcaaaatcactaggcttaaccgtgattgtttcaggcaatgcagccgcgcgagatcacattttgaatttgggtgctgaccaatatatcgattacaaaacaaccgattactgggaagttttagatcaaatcgattacgtgattgatacacgcggtggagcagatattgaacgtgaaatggcgattatgaagccgggcgggcggattttaagcttgattgccggtccaaacaaacaattcgctaaacaattgcaattaccattttggaagcaactcttattctcgttggccgggcggaaatgggatcgcctcgctaaaaaagcgtgcgttgaatatcgctttattttcgttcgttcagatggtgcccaactcaaaaaaatcactgaaattgttgaacaacaagcgattgtaccagccatcgatccgcatcaattcgatttagcacacgttaaagaggcactagaacttgttgctcacggccatccaactgataaagtggtgattaaggttcaagcgggctaatcaagatgacttatctaacaacccccaaccaatttattcaagatcaacaaggccaacggtttgcttaccgcgaagtgggtaccggtcgcggcttaccacttgttttattgaatcacttatcagccactttagataactgggaccctgcattaattgacctgatcagtcagcaacgacgcgtgattgtctttaataatcgtggtgttggtttctcggatggcaaagtccccacgacgattgagcaaatggtagctgattgttatgcttttataacagctatgcagctcactcaattcgatttacttggattatcgatgggtggttttattgcacaggccttcactttaaaatacccctcaagcgttaatcacttaattttagtcggaacaggtccccagggtgactcagaaatcgccaaagtggggcgcataacaacttttgacttaattcggtccttcttaacgcatagagacgttaaggaatacctcttcttcaccagaacgccccaaggcaaacaggctggtaaagcgttcattaaccggttaaaacagcgtgaaattgttgaagataaagccattacgttagccacttatcgtcgtcaattaatagcaattaaacagtatgcgcacgatcaaccggcaaacctggcacaaattaaccaaccaacattgattgtcaacggcgatcacgatcgaatggtacctgttaatggttcatatgaattacatgaacggattttaaattcccaattaaaactttacccagatgctggtcatatggcgttattccaaaatccaaatgactttgcagctttgttggctcagtttttaaatcactaattacagaagcgtcattttaatatggcgcttttttgctgcgcttaaacgctggtgacgagtgggtaggcttagttaattttttaaatctattttagtttacataatatatattatgcgaagaaacgcttatcccttgaaagagcgctaaaataaccacttattatccaacatcattcaattgatttgatgaaccgcacttaacgcgtttgttttttacactgcacgattcataaactattacaagttactcaacgccaatatgatgaatcaaactgactggccaaccgatatcgccaaacttaactttaaatgcagaattcatctaagctcaggcacaaatccgtgattaatctgacgattatgccagattttaattggtaaatacgcatattaacacatcttagccttaaaactcacatatcaaatcgttaaaaaaggccttaaacgttgatataccagcttttaaacggaataaggatctttaggttgctgtgcagatagtcgaataagaccatctgatcatcagttcgcggaacggtttgcaatacagcggaacggtttgcaatacagcggaacggtttgcaatacaagtgttgttaaaattatggttttaacaacacttgtagtattctcacctcatttttgctaaactatctttaaactgctaattaaggagtcttccatcatggatcaacaacgttacttagaactctgcgaaaagcaactcgccaatcttccggattacattcgtaaattctacattaaccgccaggcaaacgcctactcttctgcaacgctctatcaatacttacaagaatacgttcgctttttcacctggttagttgatgaacagatcgtcgtggtcccctctatcgaccagatgccactgaccgcactcgaaaaaatgaaactcgaagatattgagctctacaagatttttctaatgaataagcgtaaacaaaataaccataagctctcctttcaagccgttaaccgctcgattaacgcattaaatgcgctctggtacttcttaaccattgaagccgaacaagctgatggtgagccttatttttaccgaaacgtcatgaagaaggtgaaactacttaaagcttcagaaacaatggcgacacgttcacgacacatcagcaaacaactgctgaccggtgaaaagaaacacgacttcatcaccttcatgcaagttgattaccctaacttgctttctaatcgccaactggcatcatacaagcaaaattgcgaacgcgatattgccatctgtgtactggcgctggcaacgggcatccgactatcagagttggcccaagccaacatcaacgatttgaatcttgaacaacttacaattaccgtgatccgtaaaggcggacagcaagatactgtcccaattgctccgtggagtttaccttttttaagggattactgccagattcgtaaatcacgctatctaaaagaagataatgaacaagccttatttgtcagtcgctatcgtggcagcgccaagcgtatgagcaactatgccattgaaaagttagtcgcgaagtattctgaagcatttggcgtgcgtctcacaccacacaagttccgccatacacttgccactgatctcatggcggcaactcatagtgaaacaattgttgcgacccaactaggccaaacgaccacgcaagctactcacttatatacgcacgtcgttgctgatgaacaacgctcggcaatggaccagcttgaatagccactattagtgctcttcttggcaacgattatcaatgtcgttctaacagtcatttggtttacatcaattcgtcgatttacacattgcttgacttataccagctatcgagtatactgaaagcgttcctaaaaattaaatgttaaccatcgcaaaggggagccattggctgagagtgattttaatcagacccttcgaacctgtttgttaagacaagcgtaggaattgtgatggagttgaaatgataactccttttttgtgttggttgaacaagaaaaggggttatttttatgcaacatcagcgtctattgattcagattgaaggggcaatcatcgcggcatttgccgtggcattggaatacatcccccatacagtggggccttccgcaatcgaagtctcctttgggattatccctattgtaatctacagtttacgccgtggtgccattcctggaatggtctccggcttaatctggggtctactagacttaatcttacgtggattaggaaacggtagtgtcttgaacgtatggcaaggattgctagaatttaccattgccttcatggttgttggtttagcaggtatcttacaacgacctattcaagcaagtattcaaaatcatacaaaagtcaaaacgatgacccttttatggatggccgcattttttggtacttttgcaaaatacttctgccacttcttagccggtgccgtttattggggctcatacgctcccaaaggtatgaatgcttggctatactcgctcactgttaacggtggcagctttatcgctagcttcattctaaccggcatcgttctatgtatttgtttagccatggtgcctaagttatatttaccaaaagacatggttttacacgtacaatctgaaaaataaacaaaaaaagagccgtattaacacttgaatggtgttaatacggctctttttaattcccttaacgatccgttctagctcgtaatgcatataagattgaaactgtatcgacaacctcttggaataaagcccccactaatgctggaacaatcccggtgctggcaatcaacattaacccaatacagattgcaatcccaatcaaaaccgcctggcgagcaacgcgcatcgtgtcacgcgcgatttgaacggcacgactaacccgtcctaaatcatcttttagaatcaccacatccgctgattcacttgcggctgttgcgccatgggcccccatcgcaatcccgacatcagcacttgccagtgacggtgcatcgttgaccccatcaccaaccataattagtgggcgttggtcttgcggtacttgttcaattaaatgaatcttatcgactggcagacagcctgcatggacgtcatcaattccgacttgttccgcaatctggtgcgcagttgtcgcttgatcgcctgtcaacatcatcaaacgcgtaatccccagttgatggagcgtctgcatcgtggccggtgcttctggtcgtaaatgatcgataaacgtaatgtaccccgcatattgatcattgatcgcaacgtaaacagtggtttgttcttgcagaggctgttgcgcatctggcgtcacgaattgatgtttcccaacacgaaccgtttgtccagacgacagcgtcgcaactaccccagcgcccgttgcttcttttaatgtttcaattggttgtaattgttctacctgtgccgctttaacaagtgaccgtgctaaaatatgcgaagattcttgctccgcactagccgccaattgcaataaatcggttggtgcgataccaatcactggcacaacttggtcaaccgtcaattgaccattcgtaattgttccagttttatcaaacgctgctgatttagcagacgctaatttttcaattgttgtgccagccttgacaataatcccgtttcgactagcacgactcatccctgagattaacgcgataggcgctgccaatattaatgggcacggcgaagccacgacaagcacttctgcaaaccgtactggatccttagataaccaccaagctactccagcaatcacatacgcaactaatgtaaatggcacggcatatcgatcagctaagcgcacaaaatgcgctggttgtgccgcagaggtctctacaagccgtacaattgcttgatattggctattaacggctaattggtcaacttgcatggtaaccgacgtatcgccgttcacagagcctgacatgagctcattatttagtgctttttcaacggggcgtgattcacccgttaacgatgattcatcgaataaagcacttcctgcaataatatgcccatcaacagggaccaattcgccaggtttaataatcacttgatcaccaacttgaagcttatcgactgaaacatcttcgaccgcatcattaacaaggcgatgcgctgtttgcggagaattatcaagtaatgtctttaactcacggcctgctttatgcgctgcatagtcttccaatgagtcgccaccagttaacatgaccaagaccattagtgctgcccaatattcaccgaccgctaacgtcgcaataatagcggtaatcgctaatagatccaccccgtattgaccagattttagcgttttaatcatctcaataaacatcgagagcgctactaagctccccgctaaactcactaaaatctgtgcccacaatggctcatgtagcaaaaacgccaagcatagcgcaatcacacccacactaattgttaaggcaaacttgatggtatgtttcatcgtcaatcgctccttcttgtgaattcatttacattataacacatttttagttagattagaataattccaatctgatggcacacaaaaaaagccccccaaattaatgagggggcttttttgcagatagttggtttataatagcagtctgcacggcagtcatcgctgctaataatagagtcattcgttttatcacgggtgatgttttttttgattagagagtgctttttcagttttatgaataatcgattcaatcggggcttgtgcctcgactaaggcttcgactgttatgtctgtgtgcccgttcaataaatcacgaccaacttctaatgcgtaaagcctattttttaataaagtaaattgagccgaacccgctacaaacttcagctgactcttttggcaatttcgaatggtcgcttcaatcacttgaattgcatcaatgctttcctcggtcatttacctatcctcctaataaaaaaataaagccccgaaggactttattattaatcgttattaaaatgcttctgttaattgtggaaccacttgtttcttacgtgaaacaacaccggctaattgtgcacgatggttgttcaattttacgttgaaagctttttcaaaggcttctgctggttcaccgataacaagcgcttctgagttactgtttaagatgtcagtaatcaaaagtacgaataagtcgtaaccattagctttgttgtctgcttcgatagcagcttcaaaagcagcttggcgtttgaagaccgcttcgatatcaactgtattcacttgatcgatacgcacttttttaccagccatatcgaatgttttagcatccgcttcaattaattcagcttcgctcttatcatctaagttagtgcccgcttttaacatttcaagaccatatgattcgaaatcaatatcagcaatttcagccaatgtcttaatcgcaatccgatctttttcagttgttgtaggtgatttcatcaacaacgtatctgaaatgatagcactcatcattaaaccagctaattgagctggaatttcaactttgttttcgttgaacattgataataaaattgtgctggtacagccaactggttcagcgcggtagaataatgggctgactgtttcgaagtttgcaattcgatgatgatcaacaacgtgcgtcactgttaaatctttgatatcggcaacactttgttggctttcgttatgatcaaccaacatcacactgtcaacttcactgcttgcttctttaatgatgcgaggggttgctgctgcaaaatgacgcaatgcatagcttgtttcttcattaggttcacctagcgcaacggcttctacgtcgtttcctagttgttgttgaagataagcaaacgccattgccgcaacaattgcgtctgtatctgggttttggtgaccgaatactaattctttactcatatttatacagaccttccttttaaaaaaataacatcctaattataccaaaaatattagacgattctacggttttgctctctaatccgtgttaaataatctttttcttctaaataatggtcgaattcacggaaaaagctattaatccgtggaatatcttccttttccttgcggaagacaaaagctaattcgaactgaatggccggatcaaattgaaccgcgtttcccttaagtcccaaattatgtgcttcataaaaactctttggtaaagctgtacttaattcagttgcttcagcaaaacgcatgatttcaaatggtgatgtgaattgagccgcactcactggacgatcaaccaattgattcttataggcttcactgatgaattgatttaaatagtattcatctgggtatgtcacccatttattatctaatgtatctttaaaacggatcttcttacgcgtctttaaagcaggatcttggctgataaagagtaagcgttcatccacaatcttatgtgacttataaggtttccagttcttaatgctgtcatctggcaaatacataatggcaatatcaattttattattttcaagtcggtcccagatttctttccgagtcaataagtgcatgctgacttcgatgtcaggaaattgtttatagtattgaattaagaaggattggataacactgatttccatcgatgctaaaatcccaatattaatcttaccgcgcgtcgcactcgttgaactttgaatttcatccgtcgcagtatttaataaatcatgaatctgatgggtagcatccaacatcgtccgaccagcatccgaaatatgtaacttcttgccgactgaataaaataaaggcgccccgactatccgttctaattttttaatctgttgggttaaagcaggttgcgtgataccgagtagttgtgccgcttgggtataattcatcgtttccgctaactgtaggaaataggttaatgttttagaggagaagatattttcttgtcttgttttcattttcaaatctccgttctttagtttacgcctatcattataataataaagatataaaaaaagagcaacccctttcgttgctcattcttattaaaggcttaaaattttcttatgttagcgttgctgctttggatagtctgctgtatgcaatagacgctccgcattgacaacgcgatcgtgggtcggtggttcaatccccgctaacggatatttaatccccatcttttcgtatttcacgattcccatcgtatggtagggcaacacttcgactcggtcaacattgtttaacgtttgaatataatcccctagacgagtgagatactcatcgtaatccgtccgttctggaatcaagacgtgccgaatccacatatgatgaccatgatttgacatatattcaatcatttctaaaatatgttcgttagaaaagccggttaactttttgtgccccgctggatcaatatgcttaatatcgaccattgaaagatcggtatatttcatcaattctttgaatttactaaagaagggttctttatacgtaaacggctgcccacaagtatccaaacaggtattaatcccttgtaccttacactttttaaataaatcaattaaaaaatcaatttgaattaaggattcaccaccgctacaggtaattccgccatctttaccccagaaggccttatatggcagtgcctttgcgattaattcgtctgcggtataagcttctccgctaccaatattccacgtatctggattatgacagaattcgcaacgcatgcgacagccttgtagaaaggcgacaaaccgaattccgggaccatccactgaaccaaatgtttcaatcgaatgaacatatccaattggcacctctggtgttatcggggtttctggaacaacattttcagttgataaccgtgttgtaaatttaattgccatttcactttcacctcttaaaagaaaagctatgctttctggtaaagtcgttaattcgcgttaacgaccttaccagaaagcggatattgctatccactttcgttagattacatttcgtcaaagaacgttcttgagataacgtcgtcttgttgttccttcgttaaatcagcgaagtagacacaataacctgaaacccgaaccgttaatgttgggtattcttctggatgttgttgtgcatccattaaggtttgcttattgaagacgttgatatttaaatgcatcccttgattaatcatgtaaccatcgaccatgttcacaagcgcgtctttacgtgcttcatcatcatgccctaatgtatttggtgtgacaccaaacgtatttgaaatcccatcagttgcataacggtatggaatcttcgcagttgaaagtaatgatgctaaagcaccgttcttttcagcaccgtatgctgggttagcacctggtgagaatggttcgccagcttgacgaccatttggtgttgtcccagtattcttaccatacacaacatttgatgtgattgttaaaacagatgttgataattttgagccacgatataaatgatgcgtattcatcttcgtatagaaagtcttcactaaccatttagcgatatcgtcagcgcggtcgtcattgttcccataacgtggatagtctggattttgcgcttcgaaatcgactgccataccgtcttcatcacggataactttaacttggccgtatttaatcgctgagattgaatcaaccgcatgtgatagaccagaaataccagtcgcaaatgtccggtctaaacgactattcttcaatgccaattgtgctgattcatagtaatacttatcatgcatgtagtggatggtgtttaaagcattaacgtaaacgtctgctaaccaatctaacatcttatcgtatttacccatgaattctttgtaatcaatgatttcacttgtaattggttgataagctgggccgacttgagctttgcctaattcatcgatcccgccgttaattgcgtaaaggattgtcttagccaagttagcacgcgcaccaaaatattgaacgccgtctgcaattggttgtgcagaaacacagcatgcaatcccataatagtcactcccccattcattacgcatcaaatcatcgttttcgtattgaatcgttgaactcttaattgaaacttctgttgcatagcgcttgaaaccttctggtaagcgatctgaccaaagtaaggtgatattaggttctggagcagcacccatattttccaatgtcttcaagacacggaaggcagtcttagtgacatgatgacgaccatccataccaatcccacacattgataatgttgcccagattggatcacctgagaataatgaattataatcttctgtccgaatgaaacgaaccatccgtaacttcatgacaaaatggtcaaccatttcttgcgcttcagcttctgtaattaagccccgctctaaatcacgttggataaagatatccatcgttgtatcaatccggccaactgacatcgcagccccgttttgtgtcttaatagcggctaagtaaccgaagtaaatccattgaattgcttcttgggcattcttagcaggtcttgaaatatcaaagccatagctagcagccattttcttcatatcttgtaaagcacgatattgttcattgatttcttcacgaagacgaatgacatcgtctgtcatttcaccgtcgccaacaccattaaagtcacggactttttcttcagctaaacgatcaatcccatagactgcaatccgtggtaagtcaggaataatccgaccacgtgcataggcatctggaaggcccgtaataatcttgtagtgacgtgctttacgcatgtctggtgtataagcatcaaaaacaccttgattatgtgtcttgcggtattcgttaaaaatcttgtgttgttctggatcagtcttaaagccgtatgcttccaaggcatcttcggccatccgaatcccaccaaatggcatgaatgcgcgttttaatggggcatcagtttgtaatccaacaatcttttcaagatccttgtttaaataaccagggccgtgtgacgtaactgttgcaggattatcattgtctgcggctaaaacgccacctgcttcacgttcttgtttcttcaattccattagttgatcatttaacgttgttgttgcttcggttggaccagctaagaaactttcatcaccgtcataggcagtaaagttttgttggatgaaatcacgaatatcaatttcatcttgccagtcacctttgttaaagccgtcccaatagtcggctaagttaattttttcggtttttaccatgtggattacctccattagtcaagtgttgtttatcacagttttcacaattttagtataacacatcacatagtttatgcaagccctttctttttgattgtttagaaactcttaaactcttttgaaagattgatttatagctatttatctacttaaaatatttttataaccccaccatttaaattgtgcaaaacttattttgctgttatagtacaaaaccaaaaaatccgcatattatgtataacagaaaaaagcaagtcatcacatagatgacttgcttttttattattttgactcgtcttcatttttaactggaatagtcgtttgaacaaatgccggttgtccaacttcatcaacatccatcacaaaactaccgttcgaataacggtcggcagttgcatgttgataagggttaattgcaatcacttcttgctgatcagtatgaatcagtaactcgcttgcctgctcaacactaaccattgctgctacccgatgtggttctttcttcaattcacggagaattaagaccccacgacgcgcacgacttgttaaaccaacctcacttaagagcatccgtttaaaggcgccccgttgcgtcacaatggcaacggctgcatgtttatcttctggatgatataacgtaaagccggtgacaacatccccatctttgagatccattaatttgaccccactggccttagcacctgatacagagacttcagataaggtaaaactcaatccataacctttatagctagcactaaagacggctagcccttcatcacttggaatccagttcacgtttgtcacatgagcatctgcatgcaacttaataaagtcttgtgccttagaacgatatgttcgacttggcaagaggtcagagaaggcagtttgtttaatatagccatcatccgtcccaatcacaaaatagccagcctgttcatttggcttaaaggcaaatgctgcaataaccgcttcatcagccgccaaaccaatcgattgcgaaatatgttcgcccatttccttccatttcaaatcagcaatttcatgaactggtcgttgaattaaatgtccgtaattggtgaacatcatcaattgatctaaggtttgtagtggcttttgtaaaatggcaaaatcgccgtctttcaaaccgctgtcggccccttcagatgcttgatacgagcgcaaactactacgtttcaagtagccgtcatggctaactgcaaccatgacggtttcgtcaacaacagtcacacttgtatcaatttcaagcgtctcaatttgtgcttcaatttcagtttttcggtcactccgataagttttgaccattgcttttaactgcgccttaatcacccgtgcaagtgcttttggatcaccaagaatcatccggtattccttaatcgctgcatcaagttcagctgattcttgttccaaagcagtcacatcggtattcgttaaccggtataattgcagtgaaacaatcgcttcagcttgggcttctgtgaaggcgtagcttgccactaaattatctttagcgtcttttttattcttgctaccacgaatcgtcgcaatcacttgatctaaaatcgagagcgccttgattagccctgcgacaatgtgctgacgatccaatgccttttgtaaggtatattttgtccgccgaatcacgacttcttcttgatgttccaagtaggcatggaggatttctaataagccaacctgtttaggttgcatatgcgagatggcgaccatattaaagttatatgtgatttgcagatccgtatttttgaacagataattcaagatcccttgactatccgcttgctttttcaattcaacaacgactgataagcccatccgatcactttcatctcgtacttcagcaatcccatcgaccttctttaaaacgcgtaattcatcaatcttcttgaccatcatagccttgttgacttcataaggaatttcgctaatcacgatttgttcccgattgccgcgtaattgttggatgctggtttttgcccggacgacaactcgaccgcgaccagtttcataggctttcttaatcccatcgaccccttgtaagatcccaccagttgggaaatcaggtcctttgatgaaggtcatcattttttctaacgttgcatcgggatgatccaatagatagaccaagccatcagtcacttcacctaaattatgtggcggaatttcagtcgcgtacccagctgaaatcccagttgccccattcactaagaggtttgggaaccgagctggtaaaacagtgggttcttcagcggtatcatcgaagtttaaaacgaaatcaaccgtctttttatcgatgtccttgagcatttcaccagcaatcttacttaagcgtgcctcagtataccgcattgctgctggtggatccccatccattgacccattattcccatgcatttcaatcagtggttcacgtaatttccagtcctgacttaaccggaccatcgcttcataaattgaactatccccatgcggatggaaattccccatgacattcccgacagacttcgctgacttccggaaccctttatcataagtattcccatcgatggacattgcgtataaaattcgccgttgaacgggttttaacccatcgcgaatatctggtaacgcccgctcttgaatgatgtattttgaatagcggccaaagcggtcgcccatgacttcttcaagcgttagctcttgaattttttgtgcttcatcagccaaatttaatcactcacttttctattcgtctaattggtcaaataaatccacttcagcgcttgaagttgtcggtgctggttgaccattcgttgtatctaagatgctaccatcttcagccattgtgaacttaacgttttcttcaatccacttccgacgtggttcaactttatcgcccatcaacgttgtgacgcggcgttcagctaaggctgcatcatcaatccgcacccgaattaacgtccgactcgttggatccattgtggtatcccaaagttgatcagcattcatttcacccaaccctttgaaacgttgttgactgtagcctttacccatttctttagcgacgactttcaattcatcatcagtccaagcataggcaatcttcgtttttgccccagcacctttttggagcttatacaatggtggcaaggcaatgtagacttttccggcttcaattaacggccgcatatagcggtagaagaaggttaacaacaaaatttgaatatgggccccatcggtatccgcatcggtcatgatgatgactttatcgtaattgctgtcttcaagtttgaattcagccccgactccggccccaatcgtgtaaatcatcgtgttgatttcttcattttttagaatttcttgtaatttcgctttttgggtatttaaaactttgccccgcaatggcaaaatcgcttggaatttccgatcgcgcccttgcttagcagaacccccagcagaatccccttcgaccaagtacaattcattcttcgccgcatttttcgattgcgctggtgttagcttcccagataataagccatcggatttcttctttttcttaccatttcgactttgttcacgtgctttacgcgcagcttcacgtgcttcgcgtgcttttaatgatttacgcactaaggcttgcgcaaattcaccattttcaagtaagaaaaagctcatttgttcataaaccaaactatcgacagctgtccgcgcttgtggcgagcctagcttacccttggtttgcccttcaaattgcaagagttcttctggaatccggacagacaagacggcactaagaccttcacgtacgtcggagccttccatgtttttatcccgttctttgagcaagtttaccttgcgggcgtaatcgttaaaagctttggttaagccggctttcatcccagcttcatgggtcccaccatcacctgtccggacattattcacaaatgacatgatgttttcggagtagccatcgttatattgacccgcaaattcgacttcaatgtcttctttggtgccttcgaaatataacttattaccaatcgtatctttatcttcgttcaaataatcgacaaatgattgaatcccttctgggtaatggaagacatcttgacgtgctggctcagcgcgtaaatcggtcaacgtaatcttgacatctttgagtaaaaaggcagattcgcgtaatcgttctgctaaggtattgtagttataagtagtcgtttgaaaaattgtcccatctggcttaaacgtaattaacgtgccgtttggttctttagctttgccaacttttttcaaggtaccaaccgggtggcccccattttcaaagcgttcttcgtaggcaacaccatcacgcacaacgcggacggtcaaccattcggataaggcattgacgacactcgcgccaaccccatgcaaaccgccggatgttttataactgttttgggtaaatttcccacctgcgtgaagcactgtcaaaataacttcaatcgtaggaatcccagattggtgcatcccagtcggcatcccacgaccatgatcacggacactaatactattatccgcgccaattacgacgttgatttctgaaccaaaaccagccaaggcttcatcgacagcgttatcgacaatttcgtacaccaaatggtgcaagccgcgaccgtcagttgagccaatgtacatgccaggccgttttcgaactgcttctagaccttctaagacctgaatcgaattatcattataatcttgtttttgatttggcattcaagtatgactcctttgtttaaaaatgaacagataaggtatattatcaacaagtttggatgattttacaatcaaaaatttaaaatttcttgccaatacaaatgtatgttcgtattcacctattctaacatacaatattccttttcccttgtcaaaatgctaaaataggggaaacaaatgccacaaataggagtttttgtcatgaaacttagtcttatctttattcttgcgtacctgatcggttcgttcccatcaggcgttattatcggccgcgttttctgtcacaaagatccccgagatgctggaagccataatatcggcacaactaactcgtatcgcgtgctcggcccaatcgctgggacagccgttttatttcttgatattttaaaaggcacacttgctgctagcctaccgatgatttttcacatccccaatcatgcattggtcttaatcgtcggcttagcggccgttgtcggtcatgcttactccatctttttacactttacggggggaaaagccgttgcaaccagcgcaggcatcttactggcatacaatccacttttcttcgtaattgccagtaccatctttatcagtgtcatcctgattacaagtatggttagcatggctagcatcctcggtccattgatgattgcgattttatcgttttacacgcatgattggctactcggttcgattgcgaccttggtcttacttttcctggtctaccggcaccgcgaaaatctacaacgcattaaaaatggcactgaaaacttagtgccatttggcctgtactatcgctataaacaaaaacatcaataactaaaaaaacgccgaacgggcgtttttttgtgcaatcagttaaagatcaatcaattgttcccgttcattgtaaaatgatcgataagctaagtaacacgcaatcactgaaccaagactcgttgccgataataacataaaggtcactaatatctggtacataatggccttgactggatcaattccggcaaaaatcaggcccgacatcatccctggcaggctgacaagccccatcgttttagcggaatcgatcgtgggtgacatccccgtacgaatactctcacgaataatggcaattgatgcttgtttagcggtcgctcccaaggcgagtcgttccaaaacaggttgccgttcatccttaaattgcgccagtaagctgcggtaactcaagccaatggcgaccatcgagttggaagcaatcatcccagtaattggaataatttgcgatggaataaacttaatcgccccagataaaacaagtaatcctaacgtgaccccagtacttgttaaaattgcgataaatgaaattggaaacccgttgcgtagtttccccgcccgctttttggcatttgctgcggcgttaaaaataatgatcagcatcatcaataacgttagccacacatcgttaatatgaaaaatgaatttcagtaaataaccaacgataaataattgaatgattgcgcgaaaaacactgataatcatatctttttcaagaccgattttttcatggaagctaatgactaatgcgacaaacactaatgtcacagcaaacgtcagtgaaagaccattaacggctaagttcatcttgatttaccaattcgccagcaacaatttgcacctggcgccctttccgttgtaattcttctgtatcgtgggtaatggcaataattgtgagcccgcaatcctcattgaggtgctggacaaacgccaatacaattgccttattagcggcatctaaaccagtcgtaatttcatcaagtaataaaacttccggtggaaataaaacattacgaatcaaggcaattcgttgcttttcaccgcccgataacgtggtaatttttttcgttagtggcatgttggctaacccaaccgctgccaacgctttttcaattgttgccatatcgaccggtaaattacgaatctcgtatggaaaacgtaaattatccccgattgtttcaccaaataacgttgcttgttgaaaacaatacgaaaccttttgtcgatactgattgggactaaactgggtcagtggctgatcatttaataaaatggtgccacttgtcggcgttagtaagtccgcaattaaccgtaacaaggtactcttaccacccccagaaggtcctgtaatcgttaagtaactgcctttttcaacggttaaattaatgtcggttaaaatcacttgttgatcaacctgataagataatcgttcgatttttaattgaatcataagtccctcctgacaattatttaattcatagtatacacgaaattcacttaattagtgtcttctgctgattgaaaaaaggacacctaaaagcttatactaatattaggatatattaagtgatggacgttccgtccgctctggaaaagagatgttgataatgttaaatagctttccgcaagtcatgacaattgccggttccgattctgatggcagtgccggtgcacaagcagatttaaatactttttttgcccgtaatgtttatggtatgagcattttgacagcctgtgttgctggaaattcatatgggattcgtgctagccaagcactgtctcccgactttattgatgccgagtttgaagcaattgcagccgactttcaggttcgcgcttgcaaaacaggaatgttaaccgaccgtgagaccattctaaccgttgctaatcagttgaaaaaacatgactttggtcccctagtgttagatccggtcattattaccaagcatgaagcattgttgttggcagatgatgcttttaacacactaaagacagaattaatgccccttgcaactgtcctaacgcctaatttctacgaagcgcaaaaattaactggtattgaactgaagacacctgctgatttccaagctgctggccaagcactattggcaatggacgcaaaaaacgtcatgattaaaggccatcacgaggccggacaatcaatcgttacagactacgtttgccttgccgatggacaagaattttggctatcagaaccttacgttgaaaccacccatattaatgggacgggcgattcactttcagcttgcatctgtgctgaaatcgctaagggacagacaattgaggctgccattaagaccgctaaacaatttgttcaccgcgccatcgctaacccgattgaagtcggccacaagtacggtccaattaaccaccatgcttaaaatacaaaaaagcccacggatttttccgtgggctttttgaatgtttagtgttctgcttcttcaatatcggcattgacttgttgtaagtcaaagtcactctttaaaaaagcttcgttatcacttgggaagtgctgttcaaacgtttcaaacggttggagcgtcatttgagcatcgaccacggtatagtctagaatatgaccgccaaagtcgtgcgtatcgtttaagaagtgtacgtgatagcctgcaacagctgcgccttgataaagcgctggtgcataatacccaatcaacgtgcccgttacgtctgtttgttcaaactccggttgcactcgggttgcagcagtcaaattcggataaggttcctgttgtgtttggacggcccgcgtatgcatgactttgaaagtcccagtcattttaaccgcaaaaaacaagttttttaacggtgcttgcgctagaatttgcgtttctaactcagcctttgtgcgttgatgaaccgcttgtgtaggtaatgatgaatcttgccaatgcactgtcgcaaatggaactgtcgcatcaggtgcgagttcagtcacttggccatccccattcacagtataagcatggccatctaataagaccagttcgccagctaaaccgtgcgccgtcccgattccaaaattcccatgggttaataattcagcaacggtcattgtccctgtaaagagccccggaattaatagggctaacgttccgtgttgataaacgcgtttgacatcatttgtcattgattttcctcctcaaattaaacgagttggtcaggtaataatgcttggcctaataattgattatctttgtaatcaacgggcacatctacaaggacgggaccatcaatggcaaaggcttgatccaatactttaccaagatctgcggctttttcgacccgtaacccggttgcaccaaaactctctgcatattggacaaaatcaacgggaccaaacttaacggccgctgattcgccatatttcatttcttcttggaattttaccatgtcataataaccgtcattccaaataatatgcacgatgtttaagttcagacgcaccgcagtttctaagtcttgacctgagaataagaagccaccatctcccgaaaccgacacaatttgtgtatttggccgcactagagcagcactgatcgcccatggcaatgccacacctaaggtctgcatcccgttactaaagagcaagtgccgtggttcgtaacttctaaaatgccgcgccatccagatgtaatgactaccaacatcgaccgtgacggtcatttcgtcggtgacccgtgcttgcagttctgaaataatgttcaacggatgactaagtggattatcggtcgtcatttcaggtgccgtgtcacgttgattgagttctgcgtgcaattcaactaaataatcacgcacatcgcccgctagttgataccccttcatataaggtaataaaaagtctagggtctgcgcaatatcgccgaccaattctttttcaggttggaaattatgatcgatttcagtgcgcatatcatcaatcaccataatgtgcgcatcactttcagcgttccagttacgcggttcatattcgattggatcatagccgactgcaataacaagatcactgcgttttagaatgcggtcgcctggttgattccggaataaaccaactcgcccataaaaatcagtctctaaatcacgcgaaatgacaccggctgcttggaacgtttcaacgaccggaatgtgggtttcagccactaaattgcgaatcgctgctgtcacttctggtgaagaagcgcgcataccaactaaaagtactggtaattttgcttctttaatccgttgtgccaaaagcgtcgtttcaacgggactggctggccctaatttaggcgccattagcggtttaatcactttagaatgaacttctgagtccgtgacatcttgtgggatgctgacaaacgttgcgccctgtttagcggattcagcttcttgataggcgttagcaatcacttctgataaattctcaggttcttggacttccgcactgaattttgtgattggtgcgaataaagcggcattacgcatgctttgatgcgttagtcgcaacaaatcagcgcgtttcacttgaccggcaatggctaagactggatcaccttctgccgttgctgtcacgacccccgtcgctaaattactggcaccagggcctgaagtcgccattacaacgcctggtttgcccgtaatccgaccaatcccagccgccatgaaggctgcattttgttcatggcgcgtcaaaattaatttgggcgtctttggattaacgggatgttctagtcgttcaaaaacccgatcaatcttcgcacccggaatcccgaacacgtactcaacatcatgatttactaaactatcgatgatggcatccgcgccgtaatacttcttttcttcagtcatgacttaccctacctaacctatgattttataacttatatcttagcatggaactactggaaaaactagcagagtgcgtttagaatgcgttacccgcctacagccagtttactaaaaaaacgcactcaccatcttggtaagtgcgtttttttaatcattcattaacgaacagtaatttcataacttgcattaaacgtttcacctgcagccagttcgttgacaccaaatttttctgaaagttcaccgcttgcgtcaacggtatccgcaatcccccaccaaggttcaaggcacacaaggttgccttctgttggataaggtgaccaaacaccaatgaatggggcgccagccaatttcatggtcactgagtggtccgttttttcagaacgaatactgaattcattggcttgaccctttaattcgtagattaaggcgtcatttttaaataattggtgattgatatccgttgcgacgtcggttggtgctaacgtccggtcgttcaaattaatgaaggccccttgcaatgggatcttaacccgtgatttttgtgggcggtagtctaagaaataatcttcaaattgcgtgtcatccgttaatgggactttaaatcctggatgacccccaattgagaagtacattggcccgcttggcgcaacattgcggacgtcatagccaaccgtcaaatgcatatcatgaacacgatagctcacacgtaattcaaattcaaatggatacacggcccggctgtcagcgtctgctttcaacaagaaagtcacggcgtggtccgattgttcttcgatactgaattcgcgatcacgtgcaaaaccgtgttgacccatcggataggtttggccattatacgtatattggtctgcttttgaacgccccacgaatgggaataaaacgggtgcgtgccggccccaaacatcgggatcagcttgccataaatattcaagccccgaaacggcgcccttaatactttgtaattcggcgccttttggactgagggtcaccgttaaaaattcgtttgcaatttggatcatcttaaaataccaccttttaaaaattatagaataaagcgggttaaatctttatcggctgcaatattaccgatcttatcgttgacatattgttctgtgatggtgatatcccccatctgcatgtcaggaccttcaaagagaatatcctctaatagcttctctaagatggtggccaaacgacgcgcaccaatattatcggtatcatggttaacttggaaggcaatcgcagcaatgcggccaattgcttccatcgtgaaggtgacgtgcaccccatcggcgccaatcaacgccatgtattgttttacaagtgcgttgtttggttccgttaaaattcggatgaagtctttttcagttaaatcttcaagttcaacccggattgggaaccgtccttgtaattcagcgattaaatcgctgggttttgattcagcaaacgcccctgaaccgataaataagatatggtcggtcttcaaaacaccgtatttcgtattgacttgtgagccttcaacgattggtaaaatatcacgttgaaccccttcacgagagacttcaccagattgttttttgccaccagccgtaattttatcaatttcatcgataaaaataatcccggtattttcagcacgttggagcgcatcatggtaaatatcggcatggttgactaatttagcggattcttcttgaatgaaaacttcacgcgcttctttaaccgttaccgtccgcgtaatttttttcttcggcataattgaacccagagtatcgtttaaatcaattcccatctggcccatcatatcgttcattggggcaacttttttcggttcatcaacttgaatttcgatttcccggtcatctaacaagcctttatctaactgttctttaacagataaccgttcgttacggatatcatccgtcacttcttctgattcagtttgtccgaaaccagctggtgtttcccctttttgaagcgcgttaaacatgttcattaaatcattcatgttgttattgttcttacgttgttcctttttaatgcccggtactagtagtttaaccaagcgcttgtctgcttgacgagcagccttagcacgaacgtttttaaattgttctgtttcttccatatgcacagccacatcagctaagtcgcggaccattgattcaacgtcacgtcccacataccccacttcggtaaatttagtggcttcaaccttgataaatggggcatcgacaactttcgctaaccgtcgggcaatttctgttttcccgaccccagttggcccgatcattaatagatttttaggcgtgatttcttgttgcatttttgcactgagttgcatccggcgataacggttgtatagtgcaaccgcaacggcttttttagcttgatcttggccaatgacaaattgatcaagttcggcaacgattgttttgggtgttttattcattaagtccattgtgcgacctcctaaaatgattcgacaatcacgttgtggttggtgtaaacatcgattccaccagcaatatcaacactggttgtgacgattttttcaacggataagtcatcttttccttcaagtaataatgcggtagctgctgcttgggcgaaattgccgcctgaacccacggcaatcacttgatcacctgattccgatagcgtatcaggggtgatgacttcaccattccctgaaattaataaaatatcagttgcattgaccgcaatcaacatcgcttctaatttttgaagcgttggatctttacgccagtcttgcgctaaagcaacagcagcatgttgcaggtcgcctgaatacttttctaatttttgttcaaaccattcttgtagcgtaaaggcatctgcaacaccaccagcaaagccgattgcgacttgattaccataaattcgacggacctttttagcagaatccttcgtcacaaatttttcgcccatggtgacttgaccgtcaccggcgatagctgttttaccattatgtttaactgcacaaattgttgtcatatgaattactcctaacgttgtttggggattgggcggggcttaacgtgcttttcaaactaactttctgcgcttagcgctgtgaatcaaatcagcgactttatcgctaattcgcttccctgtgctagtgctcaaaagttgaacaagcttgaacgcacttacttttttcttaacgtgctttcatcaactgctttctacgctttgctacatctgtcatatcaccggcgttgccggtaatccgcctgattaggcaaatgctcaaaaacaacccgttgatgacgcacttctttcttaacgtgcttttcaaaccatgttcttgcgtttagctacacaagtcaaacaattgcttccagtaatcattcgccttgttaggctaattctcagaacataaccggtttgaacgcacttctattttagcagtctttaagactgtgtgctaatattagtctatttttcgttgaaaaaaatcaaactttagtccgagttttacgcgcggggaaagaattggcggtaatctttttgtaaatgggctgtggtgacatgggtgtaaatctgtgtggttgataaactactgtggcctaataattcctgcaccgttcgcagatcagcaccgtgatccaataagtgagttgcaaaggtatgccgaatcatatgcggatgaatgtcactcgttaaacttgttttcttgataatctgatctaaaatgtattcaattccccgacttgtaattggcgctccgagatgattaacaaaaacgacatcgtggtccaattgttttttggccatcaattgaacacgaccaacttttaaataagcttgcaaggcacgttcagcatggtgcccgaatggtacatagcgatctttattgccctttccatgaacaagaatgacgcgtaagccgaaatcaatttgtgctaccgtcaactgcgcgcactcactcacccgcatccccgtcgcatacagtaattctaagatggcgcgattccgttgatcgagtggttgatccccatcaatggcagcaaatagcgcgtccatttccttttcgtaaaaaaaccgcggcagcttatgctgttgcttttttaattgaacagcttcaaaaggatcggtttgcacgaactcatttttcactaaataccggtaaaacgaccgcaaactcgaaattcgccgcgcgacagtttcacgactatattctttttgatccatttcattcaagtaagtctgcacgtccagtggcgtgacctgtttaaacgacgctaagccgccgttagcggttaaaaaagcactgaacatctgaatatcagcttgataagctttttgggtttctggcgagtaatgccgatcgaccactaagtactgtaaaaaaagattaagccattcttgttctaacgccaaaaaaatccctccaagcttgattagtattactttaccacaagcctggcgggatttaaaagattctaattaaagtgtcgtcttaaattggtcgatactttcaagtgcgcgatcagcaagtgcttggttccgttcctttttatcgcgaatccgttgtttcaaaggttcgaaaatcccaaagttcgcattcatcggttggaaatgtttggcactcgtatgggtaatatagtgcgccattgatcccatcgccgtatccgttgggaaaacagccggtgtttggtccaacgccagtttagcggcgttaatcccagccactagtccagaagcggcactttcaacgtagccttcaaccccagtcatttgaccagcgaagaatagatcgtcacgttgttttgattgataggttggtaataaaacatctggtgatttcatgaaagtattgcgatgcatcacaccataccgcacaaattcagcattttccaaaccaggaatcatgcggaaaacccgtttttgttcgccccacttcaaatgtgtttggaaaccaacaatgttgtacaaactagcagccgcattgtcttggcgcaattgcacaacggcgtatggttgtttgccagtattcggatcttccaatccaacgggtttcaaaggcccgaataacatcgtcttaatcccgcgtttggccatcacttcgattggcatacagccatcaaagaacttttcttcttcaaagtcatgcatttctgcaacttcagcgctaatcaaggctttgtagaagttttcgaattcttcttcagtcattggacagtttaagtaagcagcttcgcccttatcataccgtgatttgaggtaaactttatcgaaatcgatactgttcttatccaaaatgggcgctgcagcatcgtagaaatacaagccatcactgccgtttaaggcactgattttttcagctaagccttcggacgttaatggaccagtggccacaatcgtaggaccttctggaaaatcggttaattcttcatgatgaactgtgacacgttcatgattggctaagcgatccgtcaccgtttgtgaaaacggtgtgcggtcaacggccaatgcgccaccagcaggaacggcattttgatcagccgcactgatgattaatgagtccaagtgacgcatttcttctttaattaagccaaccgcattggtaatttggttcgcacggagcgaattcgtacacactaattctgcgaattgttctgtatggtgcgccggtgtcattttaacgggacgcatttcatagaggtgcacattcacaccgcgttgggcaatttgccatgctgcttctgaaccggctaatccggcaccaatcacgtttacaaaaggttctgtgctcatttgctagtctccatttttctaattatttttggacggtttcttcgtagtcaccgtttggacaaattacttgtttgccacctttaattttcttttcaacaaggtagtgttcacacttcggacagtttctgccgacgggtttatcccatgtgataaaatcacaatctgggtaacgatcacaaccgtagaataagcgattcttcttcgatttacgttcgatgacttgccccttaccacatttgggacaggtgacgccgatttccttcacgattgccttggtattgcgacaatctgggaagcgactgcaagcgaagaatttaccataacgacccattttaacaaccattggggcaccacagatgtcgcagtcaaagccagctggttcatctttaatttgtactttttcgatttgttcactcgctttttcgacttctttttcaaacggtttgaagaagttgtcaatcaccttgacccagtcttctttacccgtttcgacttcatccaaacgatgttccaaatcggccgtaaagtcgatgttaacgatgtccgggaagaattcgacaattaaaccattgacgatttcccctaactcagttggttcaaagcgttttgcgtttaacttcacgtaataacgccgttgaatcgtttcgatcgttggtgaatacgttgatggtcgaccaacaccgttttcttccaaagccttaactaaattggcttcagaataacgtgctggtggctgcgtaaaatgttgcactggatcagttctaacgagtttcaccgcatccccaactgcaagttctggtaagacattatccttagcagagtcttcagtatcacgtgatgacacatagagtttcgtgaatcctgggaacttcatttgtgagccgtttgccttgaataagacatcaccttgagcaatcttaactgcgaccgtatcaaaaatggctggtgtcatctgactggcgacaaaccgtgaccagattaagttatagattttatattgatcgttagttaaaacgtctttcaagctcttaggtgtccgcatcactgacgttgggcgaatcgcttcatgggcatcttgtgcaccttcaggattcttcgtcttatgcgcctttaatgccgcatattcttcaccataattgtcatggatgaattgtgacgcttcatgtttagcaccggtagaaatccgggttgaatcggtacgcatataagtgattaacccgaccgtgccttctttgccaccaaggttaatcccttcatacaattgttgggcttgcatcattgttttccgcgttctgaagttcaacttacggttggcttcttgttgcaaggaactcgttgtaaatggtgcggctgcaaaacgtttgcgttcccgtttcttaacatcttcaatcgtgaaatccttagtcttatcgatttgtttcaaaatcgcttgaaccgcatcattatcgctaaggggtaatttcttacccttcacgccgtagaaactggcgttaaacttactgcgactctttttaaattccgcatccaatgaccagtattcttctggaacaaaggctttaatctcgttttcacgatcaatcacgagttttaacgcaacggattgaacccgaccagcactcaagccttttttaaccttttgccagagtaatggactgattgaatacccgacaatccgatcaagcacgcgtcgcgcttgttgtgcatcaacgagtttcatatcgatactacgtggatttttaaaagcacttttaacggtgtctttggtaatttcgttaaagacaacccggtttttttcagttggatcgagttttaaaatatgggaaacatgccatgcaatcgcttcgccttcgcgatccggatcggctgcgagatagatatgatcaacttttttagcttgcttttttaattctttaatcgtttcgcctttaccgcgaatcgagatatatttaggttcataattattttcaaaatcaacacccatttgactctttggtaaatcgcggatgtgacccttgcttgcaacaaccttatagttgcgcccaaggtacttttcaattgttttggcctttgcaggtgattctacaatgactaaatttttgcctgccatggacaaacccctttcaacagaacgctttgttcaaatcgttcattagcataaaacactaccttgacgattgtcaactgatagtatgcttgatattaacagcttaaagcatagcataggtttggcagtatgccaaagagaaattgttttcaaacgtacaaatcacaccaaaaatcggggttcaaccacttggtcgaaccccgatttcttctattatatagtcgccagataaaaaacttagactgacaaactatttttttgtgcatcgcgttcaagaatccccgcaataatttgatcaagggtgacggttgccatctccgcttccgcagctttttgcacctgatcataagccgcatcaagggttgcttgaatgttgctaccaattaaacaatctggatttgttttttcatcaacgtgtaataaccgttgatctgtatcaagcgcctgaaaaacggctaacattgtaatctgttccgctgggcgcgctaatttaggggcaatcgtccccggtttagtcgctaataaatccgccttcaccagtagtgacattagccgccgcactaaactaggattagactcgatgctcccagcaatcgcttggcttgataaatcaccatcttgaaaaatatcgacataggccaaaatatggatggcatcactaagtttatgagaatatttcatggttcaaccgcctttttgaaatcaattcaggcttatttaataatcgtctgtaacgcttcttttaatgaaggtaatggtcggcctaagacatcgggtaaatcagaaatggtttcatctaaatcaccatcttgaatcattgtttgaataccagtgacaatttcagcgacttcagcaggtaagccgttgtcttcgaggctttgacgataatcagccgcatctaatgatactaccttaaattcttgattagtcaactcgctaatcgcttgagctaaatccgcataagtggctggcgcaccggcaaattcataaatcgcttttggttgatcgttgactaataccttagccgcagcttcagcatagtcgtgttcgagtgcccaaccaacatgcccttcaccagcgccataaacaaatggttgacctgctaatgcgcctttaatgctatccatttcgttttcaagataccagttattgcgtaagaatgtatgatcaatgcctgatgctgccaatgctttttcagtttgaatgtgatcacttgctaaagcacctgttgcttgatcagcgtgtgggaaactcgtataagcaatccacttaacgccagcctttttagcagcttcaatcacggttaaatgttgttgcgcacggggcacatcgccaccaggttgtgaggagatgaataataaccggtcaacgcctttgagtgattccgttaatgtggcaacatcgttatagtcaccgggacgaacggtcacaccagctgggaccattttagtggctttttcagtattccgtgctaatccaatgatttgttctgctggcactaagtcagccaacgtcttcattgcgacttgcccaaaacgacctgtcactgctgtaattgcatatttcatattaaaaatcccctttgaattccatttgttactttataagtaacttgtgactttaatattaacaacatgccgcagaattgtcaacaattaaccctcaatcaaaataatgcaactcgtccaataacaattgttgatttaaaagcggcgttgcaccggctaaaatcagttgattacagcctgccgataatgaatgattaacctggcccggtaaggcatatacgttacgattggcttgtaatgctaaattagcggtgattaagctaccacttttttggcgggcttctgtgaccactaaactatgacaaagtccggcaataatccgatttcgggctgggaagtggtgcttcttagccgttacgtccaaaccgtattctgatatcaataaccctttttcagcgaccgcctgttgcaagtgttcgttttgtggtgggtaataacaattcaagcccgttccaatcacgccaatcggtcgtaaccctttttggagtgcaacttcatgcgccatcgcatccgccccttgagctaaaccactgataatcgtcgttgtttgtggtaatcccaataaatgctgcagggcttgcttagtatactccgtggcttgccgcgcaccaaccaccgcaacacatggctgtttcaaaacacttaaatcgccgcgataaaataaaactgttggcggacaatgggtttctaacaaccgttgcggataatctgcttctagaatcgtcagatactgaacataacgttcatgcgtggcacacttctgttgcagagctagactgtcaaaactagtctgaaaggtcagccaatatcgctccggtaaacacgcaatctgcgcaatctccaatgccgataaagcccaattgtgactcgttactaaccatgcggctaagcgtaattcactgatggggccaaacccatctgccaggtgtactttcaataataattgctttttagtcaacacaaaaaaacagctcctttacgtttatcttcgtaaaggagctgttttattttctatagggcgtctttaacgggcgaaaaactgcggcggtgaattggcgtaacaccgaattcagctaaaccagcgagatgtttcgctgtcccgtaacccatattattagcaagatcgtaacccggatactgttgatcataattaatcatcaattgatcccgaatcactttagccacaatactggctgaggcgatactaatactgcgcgcatcccccttaatcaatttttcttgtgggatgtctgtcggcacggtcattgcgtccaccaataggtaatcggggtgttctgctaaactagcgacagcttcgcccatcgccagttccgtagcgtgatagatattctcttggtcgatccgtggtgcatcggcaatcccaatgctgacactgatggcttgtgccatgataccgcgatacagttcttgtttcaccttaaacgaaagctgtttagagtcgttgacttgccataggtcaaaatcatgtggcaaaatgacggccgctgtcacaactggacccgctaatgggccgcgcccaacttcatcaattccagcaatcaagggataatctggccataaactttcttctagctggcgtcgttcgataaacgccgctttttgcgccgctaacttagccatccgcttgtcatattgaacgagtaacttctgcacgccagcacgcgcatcactgcgtaagagcgccacttcttcctctgaaatgtcgtctaataagcgtgccttaatggcagcaattgattctggtttggtcattagtgcgcctccacaggaacgatatcgagtgtaaagcgccctaacttacccttacgcgcgtccgtgatgaatttcatacagaagcgatcgtagtcttctttaaaacctagtcgtttggtcaatgccatgattaaatcaggcgctggcatttcaagttcagccggcgtcacatggtattcttttaccaattgttgcggatagaaatccttgaaataatcgagggcatacaccacaacatcatccgggtgataaattgcatccgaaatcgcaccagttaaggccaacttattgccgacagctggatcttcgaatttaggccataaaacccctggtgtatctaacaattcgagtgattggcccgcttttaaccattgttgattcttggttacaccgggtcgattacctgttaccgcaatgtttttttgcaccaagcgattcaaaatcgttgatttaccaacgttaggaaccccaacacacattgcacggatcaccggattaagaatcccttttgcccgttttttagcaagtttgtctgccaaaatttcttgtgctactttttcgatttgcggtaattttgatttatgttgcgcatcaagcgcgattgctgtaatcccccgttttttaaatgtttcaatccattgttgtgtgcgtttggcatctgccatatccgctttgttcataatcaagagcgtcggtttgttttgaccaagttctgcaatcatcggattaatggaagattctggaacccgtgcatccacaatttcgagaatcaaatcgactgctttgagccgttctttaatttgtttttgggcctttgccatatggcctggataccattgaattgtcataataactcctttattgctagttaagcgatatacatcattcttaatatttgtcactgattgtattattcttaattctatcatacctgatgtctggctgacgggttaaatttaattccggactacaacatccaccaattaagcgtatcattttttcagttaagcatcatattcagtacatttcatacgatcattagcactcgataatcaaaaaagctgacacactctagagtatgtcagcttttaattattattttaaagattgtatatctttaatcggccagtagaccgccactgctcggcctaatattgtatcgcggtggatcgtaccaaacaaacggctatctttgctaatctggcgattgtcacccaatacaaagtactcatcttttggaatctgtttttcgccgattaaggtttttaattcaaaatctgatgttaaaatccctggtttctttttggcctgattcaagaatggttcgtcgacatgccgtccattgatgtacagctggtcattgcggtatgcaacggtttcacctggcagaccaatcacccgtttcacataagttgtttgatcagctcgggtgaagacaacaacatcaaagcgcttgatgggcccactagtgcgtaataagagttggtccgctgactcaagcgtcggggccatcgattgccctgacaccgatgcggggaccagaatgaacgaccgtaacacaatcgctaccgtcccagccagtaaaaatgcgagaagccaatagccggtaatggcccatccccgccacaatttctgcttcggggaagtcattaggcttgttcgctttcctgataggcttcatacgcctcatcaaaaatcgtcatactcgggaggtagctgccattaagttccaaatagcgcgttaatgtttcataatcgccgctttgtttagggaaagattggtcaaaaaaggcattgttggcaaattggggaactggttcataattattcggatcacgttgggtcatgaggtaacgataaaaactctgcttcatctgaacaccttatttcttattttttagcgggatatagacgtttaaatcaatcttatcattcttcaaatcgatatgtttagcagttacttgcatcccgttttcgagcttgaactcatttaggcgtaatgtaatccggctcttgtgtgcatccaaaataacccatttggggaatttgtattgacgcttgatgtaattaaagacaaacgacatgggcaccttcaattgtccgactgctaattgtttggcgcgtaattggacgtcgccattttctaaaacgtacggttcaaaaaagaggttgaattcgaccggaaaccctaagaacttgaattgaccagataaaatcgcctgctgatccagggtgagttggtatttaatctttgaatcttccaagtagttttgtaaataataggtgactaaactattgatttgtctcttatgcatctgaatttcaaaagtgctatcagctttgatgattttctcagttttaatcatttcagtcttaggggctgtcacgttgtagccgacaagaccaactgtcccgatcacgactgctaataagacgatgaaactgtatttccaataattgatggtccgtttagttgttgttttctgtgctgcttgatgtgcttgtctggttgtcataacctatcctttctctaatcccacgtttgcttgtgtgctttcatcacttgccaaaaggcctttgtgacccattgataacctttatgattgggatggaaatgatcatctggactggtataggggttcaaatgctcgttagccgctaatgttttttgcaactgtgcactatccattttagcgagcgatttagtctgtttgacaaaatgcccatcgccccgtgtcaacatccgatcactattgacataatacgtatctttgaaatcattagcaaccgttttggcggtctgattccactcagcaaccgcctttgacatcccagtgatttcagggaaatagacataaaacggattgtagacccccatgatgaaaattggggcatcaggattatattttctaatttgcatcatcagcgtggttaaattcgcttgatatttttgctgaccagtcgtaatccgacgttgattcagctcaaaaaaattattctgtaaaactgccattaggtcgttgcccccaacagttagcgtcacaatatcagcttttgccaattgctgctgtagcggcttttgtttctgcacgcgtttagtaatctgtacactggtatcgcccgtcacaccgaaattggcggtcttgacgggatgcttggttgcttgctgaatctgattggcaactaatgacacatagccttctttgttggtctcatcaccaacaccatgcgtcaatgaatcgccaatcgcaaccaactgcaacgtcttttttggttttggttttgatttgatcactttatccgctgaagacgttgatgttaccgtcttaggcgcttggttgggccgtggcgttaatagttgccagataataaagaccactaaaatcgcaccagcaaataagcctaaatcaattaaaatctgtcgtgctttcttcaaacgtgacacctcggttatttctagataatagttaaggctgggacaattaaatgtcaaccagccttagtgtgttaatacattaattgtaatcttgttaatcctctgtgtagtacataacggcaaatgcgcctgcacccgcatgcgttgcaatcactggatcagttgtccggacaagaatttcgatgtttgggaatactacttgcaattgtgctttaattttttcgctcaattctagcccatccgcatgtgaaatcccgattgcccgaatctttaagtcgcgcatatcagcttccatttcatcgatgaatttcgtaatggtcttcatcccccggcctttgcgtaacacttttaattcgctatcagccacttcaaggatcaccttgatatttaataaacttgaaatcacaccagccgcatgactcaaccggccccccttaacgaggttggttagatcagtcacacccatgtataacttcgtatgatcgtgtacgttttgaatggctgctaaagcatcatccatgctaccgccgttttcaatgacttctgccgcttttaacacttggaatgccattgcacggtcggtaaagtcgctatcgacaactgttacatctgctttcgccatctcgccggcttggcgggctgtatcaacagtgccactaattgctcgtagcatgtgaattgataaaatctggctgccatcagccgctaattgttcatacgtttcgacaaaattcccgattgcgggttgactcgtcttaggtaaggtactcgcacttgccatttcagtcataaattgatcgcgggtaatggtttcaccatcgatatacaccgtattgtcaatcataatcgtcaacggaataaccgtaatatgatgttctttaatttcttcaggagtgagttggatggatgaatccgttacaattttaatattagccactattacttcagccacgctttctatcttgaaatctgggcaatcaacggccccgtgatttctatgattatgtctattgacagtatatcaaacaatcacgcttttttcaccaaaagttactgattaaaaaaaaagccagttgtcacttttgtagcaagcaaaaaggcggttacatcgctgcgaccgcccttaattgaatctttctaacggcgttgatagatttcaaacgtatgcgcatagcgattacgttcgtccaccacaccaggtgtttgactgatcaattcgaactgatccatcgctaattttggcatataaacgttgccttcaaacgattcagcaatttttgtaacgtacagataatcgacatcatcggcgtacattgcaaaaatatcggcaccaccaatgataaaaatctttttcatcgggttggcttgctcatatttaagcagttccgctttggtgtgcatcacaaacaccccatcagccacagctaaatccggttgtcgcgtaatcacaatgttttggcgtccaggtaagggttggacgggtaaactatcatacgttttccggcccattaccaccacttcatgaaccgtttcgtgtttaaaattggcaagatcgttgggtaatgaccatggtaagtgaccattttgaccgattaacccattttgatcttcagcccataagaatgctaacattggcgctcctcctcattaaaccgcaacggatgctttaattgcgggttctgcttcatagttttcaagtttaatatcggcgacatcaaaatcaaagatgcttgttttatctggattgagccacaattttggtgcggcatgaattgggcgttgaagctgtgtcttcacctgttcaatatgattactgtaaatatgggcatcacccaacgtatggatgaattcaccgacttcaaggccggtttcatgcgcaatcaaatgtgtcaataatgcgtagctcgcaatgttaaatggtacgccaaggaaaacatccccgctgcgttgatacaattggcacgataaccgtccgtcattaacgtagaactggaacatcgtatgacaaggcggcaacaccatacttggcacgtcttctggattccaagctgagacaattaagcgccgtgaatcgggattggttttaatttgttcaatcacgtttttaatctgatcgattgtgtccccagaacgggtttgccaagcacgccattgtttaccatagatatcgcccagttcaccatattgtttggcaaaggcttcatcgtctaaaatccgttcgttaaactgttgcatttggtcgcgataaacagtattgaaggccgcatcagtttgggcacgatgaccaaaatctgtcatatccgggcctgtgtaatcggcactttgaacgtaacgttcaaacgcccattcatcccaaatatgattattgtgttgtagtaagtaacgaatattggaatcaccttttaaaaaccacaataactcacttttaattaacccgaatggcacttttttggtggttaataaaggaaacccttcgtttaaatcaaagcgcatttgatagccaaacagactataggtgccagtgttggtacgatcttctttataatgacccgtttctaaaatggtacgttctaaatctaagtaggtttgctcagacatgatgtggattcctttctttaacgtgcttttcaaaccatgttcttgcgtttagctacacaagtcaaacgattgcttccagcaatcattcgccttgttaggctaatcctcagaacataaccggtttgaacgcacttcttttctttaacgtgcttttcaaactaggttcctgcgctttactacgttagccaaatcatcgactgcgtcgctaattcgcctaactaggtaaatgctcagaacctcctgaccagtttgaacgcactcagtttgcgtattcacttaagtattcccagcgggtcattttttcgtctagttgttggttaagttgatccatttgggcctgccactctgctaatttaccatagtccgcgccgtttgcgttcatttctgctttgatggtttcaatctgttcgtccaattgttccatgtcggcttcgatgtgttcgtattccttttgttcggcgtatgttaatttctgcttggtctttgcaactggtgcttcttcaaccgatgctgtcgctgctttaggcgctgacttagttggtgttgctttttgttttgccaagtaatcgctgaacaggccaacttcggtgctaatcttgccggccccttcaaaaatcaagagtttgtcggcaacttgatcgaggaagtaacggtcatgcgaaactgtgatcacagtcccgttaaagttttccaagtaattttccagaatcgtcaacgtgccaatatctaaatcgttagttggttcatccagtaataagacgtttggttgttgcatcaaaattttcaacaagtacaagcggcgtttttcaccaccagaaagtttgccaatcaatgtgccgtgcatttgacggctgaataggaattgttctaacaattgtgtgacactgatccggtccccatttttaccaatgacttcttcgccggcttcttgcaagtatgcaatcactcgtttgttaggatctaagtcttcattttgttgcgtatagtagccgaggttgacggtttcgccgacaattaactcgccactatcaagtgggaggcgttcagccaacacgtttaacagtgatgatttaccggccccgttgacgccactaatcccaatccgatcattcgcttgaactagaatactaaagtcatccaaaatctgacgatcgccgagttttaaactggcgttctttaattcgagtacttttttacctaaccgcgattgccccatctgaatatcgacttccgaatcgtctggtccagtggttaaattcgcctttaagtcattgaagcgattaatccgcgcttgttgcttggttgttcgtgccttagcacccgcgcgcatccacgttaattcttgcttgtagagttgttgttgcttatgggcagcttgttgttcacgttccaagcgatcagctttttgggttaaaaattgttcatagttaccgttatatgaatagagttgaccaccgtcgagttcaaaaatttggttcgcaacacgatccaagaagtagcgatcatgcgtgacaattaaaagcgcgccttgatattgtgctaagcgtttttcaagccattcaatggaatcaaaatccaagtggttcgttggttcgtccaaaatcaataagtctgggctttcaattaaggcttgtgccaacccaacccgtttttgttggcccccagataatgtattaatcggttgatccaaatccgttagatgtaattgcgtcaaaatcgtcttgatatccgtatcaaccgtccaagcatcttgttgcgtcatttgcgcatcagcttgttcgtattgcgtctgtaacttcggattagtgggatcttgcgtatatgccgccaagacgcgttcatagttttgaatcgtcttgaaaaccggattatcgccggcaaaaatcgccgccataatacttaagttcgtatcaaagcttggtttctgggctaaataactcatcgcgtattggttaggcgtttcaacctgcccgctatcgtatgaatccgtgccggtaatcgcgttgagtaacgtcgttttcccggtcccattaatgccgactaaaccaatgcggtccccttcacggattaaaaatgaaatgtcttcaaaaagcgttttttcgccgtaagtcttcgttaaatgcgttgctgtcaatgtttgcaatatagtcacctttttactttcgttaccatcaatcatagcgaataatcagacgactgacaatcaaaatgacaaaaagaatgtcgtaaactgtaaacaaataaaaaagcccctgacaacgatcaatattgtcaggagctaacgtttaaatttcagggtacatatctgcaattgtgtgttctgcatcaatcacaatgtacaaccgaccatttttttgtgagatttggctactttgataaatattatctaagccactattatctttattcttgaatgggaaataaatttgcattggtgcgcgatcttgatcatcttcaaagattaaatcgagtttttcgatgtcttgatacttcgttgcacgaccgaacatccccatttcaagagaaccggtgttgatgtcttcggacttcacatgatccgcttcaggtaagatttcggctttgaaactcttgcaagggtgaatctcttgcattgggccaccattaatgcggccataactggtggtaacacggctaatccaaatatcatttaattctttgtggctgacggtccaagcgtcaccatttctaaaataaaatttcaattccttaaaaacatgttgtgtcatcaattgtcaccctttctgaatgtgcttacatggttattttaacacaccttctgagggaatggcttagttttgtgcagccgattgcaataattgggcttgatcgtttggtaattgatctaacaccacggatttttcgagttgcgccaacatttttcctagttgcggaccaggttgatacccattttgcattaagacttgtccattgatggcgagttccgccttttgcttgatttgcagtgccgcatactttgcttgccactgatcaactgcgactgattcgttggtcattaattgggcaacaattaacgtgatgtctaatacatgttgccccgcttgataaagggcccactgatcggctgattggtctagaatggctggcaataatcccaaacctgctttaaccgcatcgatcacatcgttagcactcttccagcgtttcaataatttgccggcggcggcgggggttttacccaataatgcattgactagtagccaagccgtatcttcatcatgaatctgttgcgctggtaatgccgctaatttggtcagccccgctgcttcagtcgcgaacgctggacaatattgatacaacccggtttttaaaaaggtttgtaacccattttgccgctgaatcccttgtagcaacttcacaaattcgacatgaatgcgttccaccgcaattttcgttaatagttcagcatgtttggcaatcgcagtttgtgtttctggtgtaactgcaaagccgagttgactttcaaaacggacggcacgcatcatacggagtgcatcttcgtggaaacgttcgtcggctttgcccaccgctctgatttgttgcgcttttagatcggtcaggccatcgaataaatcaataatttcaccatcagcgcgcatcgcaagcgcattaatcgtgaaatcccgccgttgtaaatcttcgtctaacgaccgcacaaacgtcactgaatcaggccgtctaaaatcttgatagccactttccgttctaaaagtggtcacttcatagccagtcccatgatcaagaatcatcacagtcccgtgctggattccggtatcgaccgttcgtttaaaaatttgcttcacttctgctggatacgccgacgttgcgatatcaacgtcgtgaatcggcaagcctaataaataatcgcggacactgccgccgacgaaataggcttcaaaacccgccgcttcaatttgttttaagattggtagggccgcttcaaattccggcgcaaaggtggttactttcatggctatccctcttatctaacaattaactgtttctgatgctatttatcataccacaatcaaggaccccacttcagccaccaaagtggttccaactgtttttaacccccattccgtgctatatttgagttatgtaaagggggcgttgacatgacgaaacaacatacttggcaaacgactagtcgtgatttagcggtgattgcgctgggctgtgcgatctacgcgtttgggctagtgaccatcaacattcaaaatcacctggctgaaggtggcttaaccgggattaccttgattttacggtattggttgcatatcgacccggcgtattcaacggctttgttaaatatcccgctaattattctaggctatcgttacctcggtaaacgcgcactcgcctacacgatttacggaacggcgatgatgtccgtttttctatggatttggcaacgtgtccccatcacaattgatttaaaccacgatattttaatcgccgctattctagccggtttatgtagtggcttcggcagtgggattatctaccgcttcggtggcacaactggtggcaccgacgtcattgcccgcattatcgaaaaagaaaaagggatgccaatgggccgctccctccttctttttgacgtcgtagtcttaacactctcactcagttacctcgatatcgaacatatgatgtataccttaattgcgtcttacgtcttctcccggattgtgaacttcacactcgagggtgcttacgccgccaaagggctactcgtaatcagtgaccacgcgcaagcaattgccgatgacattctggccgatatggaacgcggcgtgacgtttctacaggccacaggcgcttatgcccatcaagaccgaccaatgctgtactgtgtcgtcagtccaagtgaaatcgcctatcttaaacggttgattaaccaacatgacccgcacgcattcgtttccattattgatgtgcacgaagcactcggggaaggctttacgtacgactaatcaataaaaacgccagcgattaatcgctggcgtttttaagtgtctttatgataattcctgtccctcagttaactcaatttctttttcaacttcttcaaccgtcacaaaatatttttgattgcgcagaacaaagaaaatcccaattaaaatcattaagctcgcaaaataaaaagtccaatgcgctgaccatttctcagcgattttaccagcaacaaatggtgcgattgccccgccagtaaagcgaataaagctatacgccgatgatgcaacactgcgttcaatcgaatcattttccatcgcaaccgtcgttaacaacgtattcaccaagccttggaagaaaccagcaatgatgacgccaaaggccactaaggctggttgatctgcataaataccgatcaccattaagcagatcaagaaaaagcttaacccaaacaacaacgtcacaagggtattcgttttttgttccatccgtggtgcaatgaaaaccgatgcaatggctaacatcacgccccacccgaaaaagacaaaaccaacttgcaattcagttaacccaactaataagaatggtgcatacgctaaaatcgtgaaaaacccgaaattatacaataatgcaataatcccgattgaacgtaaacgatgattttttaacgcgacagcccctgcaaaaaaaagcgcccttttagcaggtttagcaatcggttctaatgaaaccatgatggtcaacgccgcaataaacatcaaaatggcgacaccataaaacggaaaacgccatgaaagactccctaagacgccacccacaagtggtccaacggccatcccaattcctaaagatccttcgtataacataatcgcttgttccgttttttcaggcatcacactgacaatcgcagtcaaagcggttgataggaacaaggcgttcccaaagccccaaccggcccgtagcgaaattaattgcgtaatggtctgtgaacgaccagctaacgccgcaaataaaacaataatgatcaaaccaatactaatcgtttttttcgcaccaattctagtggaaataaaccctgtaaatagcataataatccctgtgaccaacatataactcgtaaatagtaaggtcgtttgcgctggtgtggcatttaatttaaccgcaatcgtttttaaaatgggatcaactaaaccaatccccataaatgcaaccatacacgtaaatgcaacggcatacgccgagcgtagccctttattttgattctccagcaacatatcactctctttctctttatataaactacattagattgcaaaacatatcaatttttacattaaaatttgacataatatagtgacatgtttgttgactctaaatatggtatactgagcaataattaatcgattaaagggtgaaataatatgagtacgcttagctatattttattatgtatgttagttcgcaaaccgtgtagcggctacgaattaaagcagtacattaatttattttgggaagcacaccacagtcaaatctacacggcattaaataaactgcacgaacaaggctatgtcacggttaaaattgatcccgttcataaacaaaagaagatttatcatttaacagaagccggccaactcgtcgttactgactggtttcaagaagaaacgaatttacccacacaacgtgacgagtttttagcaaaagtttacgttatttcactgttcaatcaagaacaagcagctgacttactccaagatcgccgccatcattaccaaaaaattcaaaaacaataccaacataagatgcaagaatacaacctcataaccgatcccaccgaaaagcaaaaaaacttaggtcgttacctgattttgaaacggcgcttaatggtctgcgcaacagaattagaatggtgcgcgtgggcgcaggacattcttaaccgcaatcaaaaccaataaaaaagacagctaatgcacttaaaaatgcactagctgtcttttttatgctttagttaaacatttcccacaataaacacgagctaaattaactatcgttagcaggcaaagcatactaacggccattaaaaacggtccagcgagcaaagccgccattgagatgggtgcttggtacaaaatggttcgcccgacatgaatcgtcaggctccaaactaagcccccggctagtaggctgactgcaagacaaacaccaactaagatcactgcatgcgattgttgtgtcagcaatagttgctgttttgttaaaccgagcaactgtaattggcgcatttgctgggcattatcctcttttgcgactaacagcgtcgccaatacattcgctaatacaatcagtaacggcgcgcccaaatataaaccaattgtcaaaatgaaattcaccaaacgttcattgttggcactcgtggtatttgtataggccggtatattccacataattgccgacatccccgtaattaaaaccgcaatgaccgtcactggcgtatacaacggcaaatatttttcagcagtatagtcaatatcatgggctgccatgttcaaaaagagcgttctagcacctaaccaatagagcacgtggctaattaattttaataccgtgtgtccggtaagcgcaattagaattaataataagaacaacacgagattcaggttgccaaccgaattgccgagactgccaattgctttctcggaatgaccgacataggttaacgccatgctttgcatcgttagtttaataattaacccactgacgaccattaacgaaacaatcgtcctaactctacgaacgatccgccgtcggtgactgagatgcttattcccatcttttagttgatggcgtgcatgccaaaaaccaccactaccggcaattagactaaccaagacaaccgttaacaaaagtgccaagaacgaaaaatgaattggcatattcggcaacatttggggcccaacaatctgctgcaaccacgcataacaaaaacgcgttagtggcaaggcaacgactccgccgagcagagcactcaccccactgacaattccgatttaaatccccaaaatagcggccagtgcattgatcgttgcccctagaatcgcaagcattcgatagtccgttttaaactgatccaaaagctggtgcacgacttctttaatcacgattaccattgtaataccaccaaaaaataccggcatgataaaaatcggcaacggtgtattcggaccgtatagatcaacttgctgcgactgtgccacattcacaattcccgttaaacaaaaaccgaggattaaacccactgttacaaaaactggtattgttgctagccattgccgccaggaatgctttaactgtaaccaactgattgtccacatcgcttacaccacctgatccaaggcagcatagattgtcgcaagtgtcggttcagtcacaatttgctgaacctgaccgtcttttaatacaatcgcacgatctgtctgactagccagctcaatatcgtgggtcaccataatcaccgttctccctttagcaaccatctctttgaaatatgtaaaaataatcgctttggatgccgaatctagcgcacccgttggctcatcggcaaatagcacatcacaatcagttagaatcgtgcgagcaatcgcgactttttgttgctcaccacccgataaagtcgcaacaggcccatcgatttgtcccgcaaagttcattttggtcagtaactgtttaatctcagcacgttgcggttgctgatgactcaagcgctgttgtaagacaacattttcaaagacgggtaaagactgaatcaagttgtattgttgaaaaataaagccaatcgtctgtctgcgaaaagccgctagttgattgggtttcaattgatacggattaatccccgcaattgccacagtgccgcctgtaggtcgcgtaatccctgaaatacaatacaacaacgtactcttaccagacccagaaggcccaacaatactgaccaactcccctttttgcaccgtaaacgaaatatttttcaataaggttgtcgtctggtcagactgcccaattgacaccacttgtgttagttgggcaaccgaaagtattgtgtttgtcatcctaaaaacctccccaaataaatcctgttcccgattcctcttcaatgtaccactttcatctggggaagaaacgcgactaaagacgcaaaaaaacgctcgactaaagtaatagtcgggcgtttttttgcattattgcatggcttggtaatcgtcatagagagtttgcatctctaaatcgtttggcacgagcttcaaatattgtttgagggccgctaacatttctgggacctgtgccatttcttggaagaataaaattaaatcgtgtagaaagtccgagttatctttcaagtcaggataagctaacagataattttcgcgcgcttggtcaacatcatccaccgccatctgtgattgcgccaatgaccaatataaatcagccgttggtttatgattttcaatcgcatcttgtaagaaagcaatgttttcggcatggcggccttgacggcgataaacttggctcaaggcactaatttcgcccatattatcaggatcaatcttgagggcctcgtttagcatctgttcagcaacctcgttattgcctaattgaagcgctagatcgctccccttttgatagaggacctcgttgtaggcatcgtacccaattccggtctgaacggtcgttaaggcgtcttctaattgattctgagcctcttgagctgctgccaagtaagtatatagtgacgtatattgtggatcagtcgtctgtaacttggttaagatttcaattgctttttgataatccttaatttgtaagtacaaaaagcccatctggaattgatcgtcttctgttagaaattctggcgtcaacccttcgtaaatctgcaaagcttcttcaaaagccccactgctggcataactagttgccaaccgcttttgaatattcacctgtcccagttcaacaacgtcttggtcgattagcgtctcatagtaattggcggccttcacatattcacccatttcaaagtacaattcagctaatgcgaattgcatgacgggttcatctggatataagcgcaacgccgtcaataatttttgttcactaacttctggtaagcccattgtttgatagacatcagctgccgtcagcagactttcggcgtacgcattggattctggcgtaatatctgccaacaagttcaaggcgtcgtcgtattggccatcgctgaccgcaatatctgctagtgttgttctgatttgatcttcttcaggaaattgggccaacaattgttggtaaattgtcgttgcttgttccaaaaaacccatcgcatataactcttcagctaagctgtagagcgtatcgggttcatcagcaactaaggcttgttggaagtaagtctgtgcttgttctaaattattatcttctaatgctgtaagcatttgttctgaattcgtcatttaaccaccctttttcgattgttccattttaacatattcggattaattgccaataaaaaaagactgggaaaaatcccagcctataaattgaattcttatttaacagaatcctttaatgctttacctggcttgaatgcaggtactttgcttgcaggaatcttaatttctgcaccagtttgtgggttacggcccttacgagctgcacgttcacgtacttcaaaagtaccaaagccgattagttgaactttgtcaccttttttcaaagtgtcttggattgaaccaaatactgcatcaactgcagcagttgcatccttcttagttaaaccagtctttgatgctacgccttcgatcaattgtgctttgtttgccatgtttttcacctcctgctcatcacagataatcagtaattaattaccgaaaccatttttgagtggtcaaaaatgacgaaacaatgatttgatcaccatttcattttttaatttatcacacaaacctagtgatagcaaggaatttcgctaaaaaacagcattctgagcaaattagttaatcatattagcggatttttgaaaaaacagcttattttcgttgacgagggatcaaatggattggtgtaccagtaaagtcaaaggttttccgtaattgattcttcaagaaacgttgatatgagaaatgaagcaagttaacatcgtttacgaagaccacaaatgtaggcggttgaaccgctacttgtgtcatgtaataaatgcgcaatcgtttcccattaatagctggagttggtgtcaccgttgttgcgtccatcaagacttcgtttaagagtgctgattggatgcgccggttttggttttcactcacttgttcaatcatcgctggcaagttttgcaagcgaacgccggtcttagccgatacaaagatgattggcgcatagtctaagtattggaattgatcgcgcacgtgattttcgaactctttcatcgtgtggttgtcttttttaagtgtatcccacttattaaccacgatgataatcccacgaccagcttcatgtgcgtagccagccactttcttatcttgttcacgaataccttcttcagcattcaaaacgactaatacgacgtctgaacggtcaatcgcacgtaatgcacgcattacggcgtatttttcagtattttcgtagaccttaccccgtttacggatcccggcagtatcaatcatggtaaattcttgattatcttcagccgtgaacttcgtatcgatggcatcccgcgtagtcccttcaatttgagagacaattacccggtcttcttttaacatcgcgttcacaagtgatgacttcccaacattgggacggccaatcaaactaaacttgatgctatcgtcttcttcttcgtcatcttcagctgggaacttagcaacggcggcatctaaaagatcacctaacccttgaccatgagcccctgaaacggcgatgggttcgccaaagccaagactatagaaatcaaaaatatcttggcgttgttctggattatccgccttattaaccccaagtaagatcggtttgtcagcgcggtataaaatttgtgcaactcgctcatccgcatcagtaaccccttctcgtgcactcactaagaagataatcacgtctgcttcatcaattgcaatttctgcttgttgtttaatctgttccataaatggtgcgtcactaatttcaatcccaccggtatcgattaggctaaattcatgccctaaccattcacttgtggtataaatgcgatcacgcgtaacccctggcgtatcttcaacaatcgagatccgctcaccggcaatgcgattaaaaatcgtcgatttaccgacattaggtcgaccaacaatggcgataactggttttgtcattgtattcattcccttcgttgttcagtgtaccctgtctgagccaaactgacaaggtcactccgacaaagtccgctgaacttccgcttcctctgcgtcgtactaatcaatcaccgacataaacgtagggtctgggacaaaacctagttttgtcccagaccctacctttttgcatatgacttttaaaaaaattatttatcgtctaatgttttaccaagcatgtcgccgatactgaaacctgtttcttcttctggcatcacatagtcagaaggcgccacatcttcgtgttctgaatccttagcaccagcaggtttttcttgcaatgctttgattgataaacctaaacgttgttgttcaggatcaactgataagaccttgacttgaaccgtttggccttcttctaacacatcgtttggtgtggcgatatgttgatgtgagatttgtgaaatatgcactaaaccttcaaccccagggaagacttcaacaaaggcgccaaatgttgttaaacgtttaacgaccccttctaaagtgctaccaactggtgctttatcagcgatatcatcccaaggaccaggttgcgtatctttaattgataatgagatccggcctttttcttggtctaagctcaagactttcacttgcactttttgaccaacttctaagacatcagaaggttggttaatgtgatcatatgaaatttcagaaacgtggactaagccgtcaacgccacctaaatcgatgaatgcgccaaagtttgtcaaacgagcaacttcaccttcaacaacatccccaggtaacattttttcaaaaactgcttgtaacttagcttgacgttcttgttccaataatgctttacgtgaaagaattaaacggttttcacttggttcaatttcaataatttgtaaggttaattcttggcctttaaagctgcttaaatcacgtacgaaacgatcagaaatcattgaagctggtacgaagccacggacaccagcatcgacgactaagccgcctttaaccacgtcgataactttagctgtgattgtttcttgattagcaaatttttgttcaatttcagaccaaactttacgggcttctaagcgacgtttagataataagtagctcccgttttctttatcgttaccgattcttgaaatgaccactaaatctaattggtcgcctactttggcaacgtctgcgatgtcttcaataggttgacttgataattctttttgaggcacaaccccttcaacaccagttccttcgatgccgacaatcacttgtcgatcttcaattgctaaaacttcacctttaacaacgtccccaattttgacttcgtggacactgtctaaagcagctgccattgcatcgctgctttgggtgttattcaaattagcttcactcatagctaaaatcctccttaacgactatctatacagttactattttagttgatatctattcggattaccagttattttacctcgttcaaagataaaattacatatttttctttacaattgctaatattgtgtcgaccacctcatcgattgttaactgagttgtatcaatttcaatggcgtcgtcagctttttttaagggtgaaatggcccgtgtactatctttttgatcacgtaattcaatctctgcttgtagcgttgctaaaggcgtcataatccccttagctgtattttcagcataacggcgtttagctcgttcttgggcacttgccaccataaaaattttaaccttcgcagcaggtaacaccgttgttccaatatcgcgtccatccatgacgacttgaccttgatctgcaatctgacgttgccgtgcaaccatctcagtgcgcacaccagctaaagctgatacttgtgagacattattcgtaatttcaggggttcgaatggctaatgtaatatcttcaccattcaagaagactttttgccctgcttggtcaggtttaaattggatatctgcttcttttaaagctgctaaaattcccgcttcatccccgaagtctaaccctaacttctgtgctaacacggttgatgcgcgatacatagcacccgtatcaacgtatacgaaccctaatttagtagccacaattttggcgaccgtacttttaccagatgatgctggtccatcaattgcaatttgcatgttctgcctcctgaaaaaatcattaaaaaaggctgggagtttccccaggccttttggtagtactgattatttaacttttagagctgtgcctggtgccacttgtgaattggctgttaacccagggtttaatgcaagtagttgatcgagtgttaaaccgttattaaccgctgcgcggtataaaccttcgccggctttcaacgtataagaaccacccgttgtttcgcttgaactgctactttcagttgttgtttcttcgctactactattttgagcgtctgcttgagcttggctttgactattagccttttcagcttcttctgcagcttgtttgctactttcaactgcttggctttcactagccgctttttcactttcagcctgtttagctttactttcgctggccgctttggtagcactttcgctagcagacttcgcttttttagcttctttcttagaagcactatcactatcagaagtattaacgacaatcttactagactcgactgggcggttagcccggctagaatgaatcgtataggcaataatcggaaatgcaatcattaaaacaagcaatacacctagaataatggcaaaatatgtatttcctttttccttactcttggaagcaacacgcgataaattcccgcgatcatcacgatcatcatcaaactggctttcccagggtttgtcttccgtctgattatctaattttttcttatcatctttgagcattgacggccctccctattggtattctttgatattgtaccatagacccttttaaaatacccagaaaatctctaaaacaattgcttcaaaataccgtcccaatggtctaacccgtctattttaggggatttatcatcagttaacgtttttaaattaaatttttctaaaaagaccgttgaatcctgttgaccacaacattgatcagcatgggcaacctgttggggttgctcgtcaaaatagttcacaataaattgccgccgacagccttgtaagtttaaataatcaaccattgtttgaagcgcaaaacgcttttctttttgccgattctgtaacagttcactaacggcctgttcatccatcccaatttgctgataccgccgtaataattcaaactcgttgccttggctttgtttaaataatgtcggttcttgatagaaacgccgaatcaatccagcttcaggaatcccaaatgacactaacgactgttgcagatacgtatcttgcggtgttgctaacaacattgcataggctggttggccatcgcgccctgcacgaccgacttcttgtagataactttcgatattttgcggtaaatgatagtgaatcacatagcgaatattggctttattaatccccattccaaatgcattcgttgcgcagattacgtccaactgcccttgcataaactgttgttgaataatgaagcgctcctgtggcgaaagcgctgcgtgataataggcaactcgcatcgctgtcttttgttgcaaaaaagccgcaatctcgacggtcttttgacgacttgaaaaataaataatcccgggcccctgactctcagttaccaattgttgcaaaaaggcgtgcttactcgcttcatccgcttgttgactcacccctaagtaaatattaggacgatcaaccgacgtaataatcctattggccgactgcaaatctagcttggctaaaatatcatgccgaacctgtgcatcagctgttgcagttagtgcgagcgttgcccccggatttaattggtgcttgatttgcgcaagcactaaataatccggccgaaaatcaatcccccattgtgaaatacagtgggcttcatcgatgaccaataaatcaatctggcattgttgtagtgcttgaatgaccgccggctggcttatcgtttcaggcgccataaacacgaaacgatactgtggcaattgtcgcaataacgcatgcttttgccgcggttccaaatttgaattaatcgcgactgcctttttttcaccttggtaattcaactgtgcgacctgatcttgcatcaatgcaattaaaggtgaaataatgacagtggtatggcccaaaagataggctggtaattgataacataatgattttcccgtcccggtcggcaaaaccgccaaagtcgcttggcccgccaaaacagattgaatcacttctaattgtcctggcttaaatgtctcatagccaaaccgctcttttagcgttttataaatcagttcatccgtgctcattgggcgttcacctgcctttgaatttgataaagccgatactcaaagaaatctagaccggggagtgcggtttgtgcttcattatagctgagcgatggctgttcagtcatcaatctagctagtttttgtgtagttgcatcctttaagaattgttcaaacggaaaccgtgggagtaacatcgcggtttctaaaaggtgttctttaatcgttccgatcttaacccggcgctggcggctgatttgtttaacactcgccccttgttggatcaattgccaggtctgtaacgtactctgactcaattgcgtttcagcctgatccactaattcattcaatagcggataagtcgtttggtgcgccaataaaagccctaaaatttgagcaaaggcgtcgatggtccgcacacgaactgtcaaggatgggctatctaaggcttgcgccagttgttggtggcttttgcccaagacttgatgtccgatcagttgatttgccacaagatcggcttgttgcggatctaactggtcaagtaattgcgccaattctagctggaattgactgctaaaattgatggttgccttatgccgcttaaaccaactgaccaccaacacgcggtccttcatactcgtttccaatggatagtactgcgtattttgatgatgatattccgacacaatttgaacggccaacataaaacgagcagtgaattggggtaagtgacccatctgtgggccttcatagtgcgtcggccaaactaattgcggctgccattcagcttgtttttgttgcccggtagcagtcaaccaaacataccgctcatcgatttcaatccaaccattttgctgaagtcgttttaattctgcttgaaattgtgcctgttctagattaggataaatttggagccattttaataatccatatgctaaaccggcatacagatttgaagtagttcgtttaccaattaaggtatagtagattgcttgataccgccttttctcaggcgccaacaagcatagtagatacgccattaacatcatcaattaagtcctttattgagaaagtgtgaatttaatgctctatagtcaagtcatcccggaacgctgtatcgcctgcggtctctgccagctaaaggcgcccgacttattcgattacgatcaagaagggatcgccttttttaaacccgatcataatcagggaacgacgccaattgaagatcctaaagaacgaattgcgtttaaaaccgcctacaccgcctgtccaactggtgcgattgtacgccaatcaacgccatttttatcgtagcatatttacgtcctataaaaaaggttgtgcccgcttggacacaaccttttttgctgccatttatttggcaattggtttttgcatatgttgttttagccatggtaaaatccgtaaatataaaacggcaaacaccaccgttacgagtgcacctttaattaaattaaacggtactaatccaaatagaatgtatttggtagtcgacattcctaagttcaaacccatcaatttaatatagagcggtaaaatgaaaagccagttagcaaatgacatgaagatcgtcatgctgacagcccccgcaacaccagcaattgcttgacctactaaaacgttcgattgacgcttgaataaataatagaatggtaacaagtagcagattgacgccaagacaccggcaaagtcgccgaccaaactcggtaagctagcaccggtcataatgaaatgaagcgtcgagcgaatcaatgcgacccccattcctccaattggtccgtaaacgaacgtccctaacaggacaatcacgtcactaaaatcaatttttaaaaacggaaatgcgagaataattggaaattcgaaaaacatgacgacaaatgaaattgcccctagcattgcgaccccaatcatcgtacgaacttttgaaacttgcattactaacaccctccagatgaggttgccttcgtcagcggacttagccaagtctgattgcatcaaaaaggtctgttaatcagggagattaacagaccttacttgcatacattcatacccaaataagccctatcttcttccatctagactttcactatcggtactggaatcacaccagttcagccaccacaagaatcaacattgtagcaggtcgcggacttttaccgccggtcgggaattacaccctgcccctgaagacgaaccattaatattttgttcgaaataagcatagcaaatcaacgtgccaaaagcaactaattaatcatgccgtgataattttggtcgattcttatgctgtggtttttcatttagttcagcaatttttttgaattctgcgacttcgattggtttcaaagcacggtattcgccagaaactaacccatctaacgttaagaaaccatatgtttcccgtttcaactttgttacgggtaggccaaccgcagctagcatgttcttaacctgatgattcatcccttcgtgaatggtgatgcttacaatggcagtgttcttacgccgatcagttgaaattactttgaccttggctggtgctgttttgcgtttttctaagacaattcctttacgcaattggcgcaacatatctgcagttggtaatcctgaaaccttcgcaatataagtcttgtcgactttatattttggatgcatcatcatgttggcaaaatcaccatcattcgttagtagtaataagccagatgtatcgtaatctaatcggccgattggataaacccgttcaacgatatcgccaaggtattcagtgacgacccggcgtttcttatcatctgtcactgctgaaatcacttggcgtggtttatacaagacataatagaccttgcgttcacgcgttaacggcacaccgtcaacttcaatatgatcgcttgtgctatccaccttgatacccatttccttcaccacttcaccatttaaggtgacgtgaccagttgcaattaaggtttctgctttccgtcttgaagctaccccagcatttgcaatcactttttgtaatcgttccatttattgttctcctttggacgtctcttccgacgtcgtatctgtttcatttaacgtttgttcaaattgacggtaatacaagtctgctgtaccaccttcactaccatcgacatcagcgtcaagtgccaattgttcaagtggtggtaattcatcgagcgattcaagaccaaagtaatctaagaaataggtgctcgttccatataaaattggccgaccgggcgcatccttacgccctttttcgctaattaattggcgggctaacaaggtttggatggccccactactttggacacctcggacctcatcgacttcaatccgcgtgattggttggcgatagacaataattgccaatacctcaagagcggcctgactaatactagttgacaccggtccatcaaaataggtcttcaacaacgtcgcgtattcttttttggtgactaatttatagatatcttcggcttgaatcaggttcaaacccgattcagtgttgccgcggtaacgatttgccaatttttctaataactggcggactgccggttcatcgagatgaataagctgcgcaatttgcgcaagcgcaattccttcgtcccccgcgacatataataaactctcaatttcagcgagatgattcaactgaaatgccctccttcaaccgaaccatgattggtgcatcatagtcggcttgttcgcaaataatttttcgatccttcatcaattctagtacggctaaaaatgttgtgacgatttcatctcgatctgttttaacaacgaccaacgcttcaaaagcaactggttgagcggctaaatgacgcacaatccaactcattttatccgtaatcgaaatttcgtcattttggaccgttttgaagaccggttgtttagcttgggcttcgaccaacattttagaaactgcggccgctaaatcgcgtggcttaatcacgccgcgcgccagtgggaccactttttcagctggattactactagctggcttagcaaagagctgttggcgctccaattcgcgctcttgcaaaaccgttgcgaccttttggaaggcttggtacgccaatagttggtccactaattcctgccgtggatcgacgtattcttctgtttcttcttcaattaattcaggtgccttaggtaagagcaacttactcttaatcttcatcaacgtcgccgccattactaaataatcacctgcaacatctagtttcaatacttgcatttggtgcaagtaatcaagatattgcgcggtgatttcagcaatgggaatatcataaatatcaatcttagtttgcttaattaaatgtaataataaatcgagtggtccttcaaaatcagtcaagaccaacgttaattgttcagtcattggtcaatctagtccatttctgtattctgatgttgttcccatttagcaatcaatggcgcagtctctaacgaacccatcacgcgactttcaggataaagcgccgctaattcatccaacatggtgaaatagttctcgtcgctacgttccgaagggttcagtgaaatatggcgcactaaaatatagtccgcacccagttcaatccccacaacaccggcaaaatcgccggcttcattgcgccataaatataaattgcgttgctcatccgacgtatagagcgccaattcagcttgtacatgactgacttcttttaaatccggtacgaaggataaaaagcccatcgcaatcttttcataatcatttttatacttgaataacatgttgacctccattgatcaaacaaagttctaatagcattaactctaccatagtttataaagcgcgacaaatctaatttaatcgcgtggatgactccattggtaaacttctgtcaaatgtttcttactaatatgcgtgtaaatttgagtcgttgaaatatctgaatgccccaataattcttgtacaattcgcagatctgcgccattttcaagtagcacagtggcaaacgaatgccgcaatgtatgtggggtcacgtctttttcaatcccagccgttttaacatgtgccttcaggttcttccaaatcccttggcgcgtcaacccgttaccatggaaattaacaaacaggtacgggttagcacgccccttcgttaattgattccggctacgatcgaggtattgattaatccaatcaaccgctacatcaccaatcggtataatccgttccttattccctttgccgagggtctgaattaagcccagtgataaatgcaaatcagccatctttagatgaatcagctcgctaactcgtaaccccgtcgcatataaaacctctagaatcgctcgatctcgtaatccaagtgcggtgctcgtatctggtgccgccaatagtcgctcaatctccgccgtcgataaaacagccggtagatgacggccttgtttgggcgaatcgatttggagcatcggattttgtttaatctgcttttcacgcgctaaatactgatagaatttacgtaacgttgaaatgctccgtgtaatactactttgtgccttatgcacatcagtttgttcttgcaagtagttcaaaattaaaaagcggtcttcagtaaaattggcaacctgctgacgttgtaaaaacgccgcaaactgttgtaaatcctgccgataactctggcgcgtattctccgaaagaccgcgttcaacttttaaataatgtaaataatcttgaattaaatcatccatgtacttcctcttttacaactgcgtcacgtcaatttggcgactaggatccagttgattggctggtaacccattttgttggttaatctgttggcaacgtgcacaaatcccgtgaaatgttaaacgatgatctaacaccgtaaatgtgtaatcatcatatacctgttgttccacggcaggcaataaatccgtatgaatttcttcgattgccccacattgcagacacaacaggtgatggtggaaatgatggtcgtgatcagtctcacacaagtcatagtgggtcatcccatcttcaatgaaccgaactttattcaacacatgcagttccgtcaacatctcaagggtgcgatacacagtggccaacccaatttcagggaccacctctttagttgccataaaaatctgttcggcactcagatgcgcttgggcatggtccaaaatgaccgccaccgtcgcagagcgttgtgctgttaacttgtagccggccgcttgtagctgctcggatattcggtctaattgctcagctttatccatttagcaacttccttttcaatcattcaaaaaagcttagtcttgcttctcgtcatctgtaattggggcaatatcagcttgacctttttcagttaaactcgttaggccctctgcttgagtaattaagccatttttcattaaccggcctaatgcccgcttaaaactgcctttactaatcccaaagtaactcttaatcgcttctggatcgctccggtcagtgtatggcattgcgtaatcaggttgccgttttaagacagccataatcatttcagcatcgtcgccaatttcttcatatgcccgtggtttcaaactgacatttaaactaccttcaggtcgcacaccaatgacgcgccccttaacctgttgacccaaacgtggttctgcttcacgttcagaaggatgaatgaacccaatgtaaaagtcatccgttaaaataaacgtcccggctaacttcaaacggtagaccgtccccatcacgtcttggttcttcatttctggtttagcaccttttgaaattgatctgaagatgctttcgtcagctagttggccccacatccgccctttttgatcgacttcaatcgcaatcattaaacgatcacctggtttaggccataatttcgtaatggttggtaaaatatccagtgatacgacaatatccttatctggcaagccaatattgacgaaaacgcctaaatcacgccgcgtttcaaccacttcaccaaaggcataatggcccacgcgtgatttaggaataaacgttgataagatcaattcccgacttgagttttcataagcaaaaccagtcaccgtttcaccgattgtcaattcttgttctaaagtttctttttttaattcaaatgtcacgccgtctttttggacaaagaaggctgtttcattttcatctgttactaaggcagtaatgacttgcccgattaattcattcatagttaacctcttttattcttattaattaatgaattggtactaaattaaagaccgttaaaatggtataagtaatccccgctgcaattacggggccagccgcaatcccttttagaaaaacgacacccatgatggtcccaaaaaccaaggccactgtcatctcaggactagcggacaatagccccacacccttcgctgatagtacagcaactaacacgccacaaccaactgcaataaaacccgccggcgttttaaaggcattgattaagtctttgacaccaatttgccctgttgcaatcgggactaggatagcaaccgaaatcactgtcactccccaattaatgcctttggcttggatcacaggcagcaccttatttgaaatcgggaatacctttaatattaaaacaaccgcggtcgcaatgattaaagattgatttttcgctaacaatgcaacgattaaaatcgctactaaaaataaccaactttccatgtaaacctccaataaagtctccctactattgtaccgataaatgaacgacttgtcagtactttcagaaaagtaattcaagattcgcatttttaaaacaaaaaaagccccctcttttcagagggggcttcatttcatcattcaggaatgattaaagagcgtttgttgcaccgcggtaaacaatcccacgacgtgaatcaacagtcacaacttcgccatctttgatagcttctgttgcgtctttagcaccaacaacaactggaatacccatagcgataccaacaacagcagcgtgtgatgttaaaccaccgttttcaacaacgatagcacttgatttttcgattgctggtaagtaatctttgtcagttgatttaacaactaagataccaccatcaattgctttttcagcagcttctttagcgtttgaagcgacaacagccttgccaacgattgtttcatcgccaacaccttggccttgtgttaattttgaaccaattaattggatcttcataacgtttgttgtgccacgttcgccaacaggaacaccagcagtgatcaagattaggtcgccttctttagcaaaaccatgttcttgagctgtttgtgtagctaagttgaacatatcatctgtattagcaggtttcttagcgataactgggtatacaccatagttaactgttaaaccacgacgtgtacgttcgtcgaatgtaacggctaagatgtcagcttgtggacggtatttagaaatcatacgtgctgttgagcctgattctgtagcagcaacgattgtcttgattcctaagttacgtgcagtgtgagcaacagcttggccaattgattctgtcaagttagtcttgctgtatgctttcaatgcgtatgcatcgcggtctgttaatgatttttctgttctttcatcaatgcgagccattgttgcaacagcttctactgggtagtcaccgttagcactttcacctgaaagcattgttgcgtcagtaccatcaataacagcgttagcaacgtcgttaacttcagcacgtgtaggacgtgggttttcttgcattgagtccaacatttgtgtagctgtgataactggtttgccaatagcgttacatttcttgatcaagttcttttgtacaaaaggaacattttcaaatggaatttcaacacccatgtcaccacgagcaatcattaaaccatctgaaactttcatgatatcgtcaatgttgtcgataccttcttgtgattcaatcttagggaagatttgaacatgttccatgtgtttttcttctaataattcacggatatctaaaacatcttgaggtttacgaacaaaacttgcagcgataaagttgatttcatgatctaaaccaaaacgaatgtcgctagcatctttttctgtgataccaggtaagttgattgaaacaccaggtgcgttaacacctttacgtgagccgaccataccgtcgttttgaacttcagtaacaagttctttgtttgcttcgtctttttcaataattttaagatccactaaaccatcatcgattaaaacgtgtccgccgacatgtgtgtcgtcgtatagacctgggtaagtaacagcgattttttcaggtgttccttcaagtgtatcgtccattgaaatacgtaccacttcaccagtgtgtaattcaaatttcttaccttgttgaacagttgtccggatttcagcaccctttgtatctaacatgataccaactgttttaccagttaatttttcagcttcgtgaaccatgttcatccggcttaaatgttcttcatgatcaccatgagagaagttaaagcggaatacattagcacctgcttcgattaattttgtgatagtttcaacattgttacttgcgggtccaagtgtacttacgattttggttttcttcataagtggaatctctccttttatgtctattttttaaaagacttttcagtcgttttaacaattttatatatggaacgatgaatctagtaagctaaatcttcgtttaaatcataaagatctaacattgcgtgatgcttgtgattgaacaagtctaacatatcatgtgcgataatttcgttcttttcaatcccaagtgcaacgccacctttgccttcaagcaataattcaactgcttttgagcccaaacgacttgctaacacacggtcactagctgttggtgccccaccacgaacaacgtgtcctaaaacagttgaacgtaagtggaaatcgccgtattcagaaagtttttctgagaattcatcagcgtgcatcacaccttcagccaatacaatgacagcgtgtttttgaccatgttcacgtgaagtacgtagcttatcagcaacggccttaacgtcgaaatcatgttcagggataataatgtcttgtgcgccaccggcaacaccagcccaaagcgcgatatcaccagcgccacgacccattacttccacaacgaaagttctttcgtgactagcagctgtatcacggatccggtcaattgattcgagcactgtgttcacagctgtatcgaaaccaattgtttgatctgtaaatggaatatcattatcaattgttcctggaagaccaattgcgttataaccatgttcagttaaacgaagtgcaccgtgataagaaccatcaccaccgatgacaactaaagcttcgataccaaacttcttgagttgttcaatacctttcaattgtccttcgacttgtgcaaattctggataacgtgctgagtacaagaatgtcccaccacgttgaatcttgtcaccaaccgtaattgggtccatcttgaagatatctccggcaactaaaccagcgtaaccataattgataccatagacttcaaggccttcatgcattgcttttcttgcaacggcacggatggcagcgttcataccaggtgcatccccaccacttgtcaaaatacctatgcgtttcatcttttcaccccaggcaaatattttacttaaaaaaccaattggtcttttaaagtcactaatatattatcacttttcagaaaataagtcttgtcttttgcgaagattttcgcaaagatagaccaatttctttattggtcaaacccttttaaaatcacatttcccgtccctaaaaggtttgtaagcgcggtcgttagtttttcgttgctcacaacccaatagcgctcgttcaatagaattgactgtttatcggccgcattgtacaagataactggcgttgttccgtgattttgttgtaacaattgatacatttgttgttgcacttgactcgtcaacgccgtttgaacccgtaaataaagggtcgctttgggtagcgtcttttgtgcatcttgtgccaattgaatctgattagcaaccacttgtaaatcgcgacgttgttcaactttcccggtgataaaaacaacttgtcctgtttgtagccattcactgacccgttgataaacgccagtaaagagcgtcacactaatttcaccggttgcatcttgccccgttacaaacgccatttgatcgccttttttcgttcgaatcaccttaattcggcgaatgaatagcaccaaatggaccgtttgctcgggtgccaaatcactgatatcaggcacatggtagtgttggcgtacacaatcatatttttcgaccggatgccccgaaacataggccccaagatattcggcttctttatccaatcgttcagtcaaggttaaattcggtacggcacgttctttcggtgctaaaacagcaaataaatcgacgttattccctgacaacttcacactatcaagcaggtcggctaagttggtcaacagcgcattccgattcggattaaactgatcgaaggcgccactataaatcaaggcttctaatgcctcttgcttgagaaacttaggatccatacgctgtaagaaggccagtaacgatttaaacggtccgttcgttgtccgttcttgaataatcgccgccacaaaatcgcgccgaacttttttaatgctgaacaaaccaaagataatccctgagtcggctaatctgaaataactttgactgcggttaatatcaggtggcagcactttaatttgacgtttcttagcttctgctaagtaagttttcgtttttgtcggattgttcaaaacggcatttaataaagctgcaaaaaaggctgctggctgatgaacttttaaataagccaaccagaaagcaattttactataagcaacagcatgtgaccggttaaatccataattggcaaaccgctcaatatagtcgtagactgtcgtagcagcagtttctgtgtgcccgcgttcgagtgcgccttgaataaattgcgtccggctagcatcaatcaccgccttcttctttttactcattgctcgccgcaataagtcggcttcgcctaagctaaagccccccatcttggacgcagcctgcataacttgttcttgatacactaagatcccatacgttggctctaaaatatcggctaacgacgcgtccggataagtgacaggttcttgcccgttcttacgagcgataaatacgtcgatgttttccatcggacctggtcgatacaacgcatttgtcgccacgacgtcttcaaaagaactcggtgccaaccgccgtaaaacattcttaatgccaagtgattcaaattggaaaataccattagtatcaccttgttggaataatgcaagtgttttaggatcatccaacggaattgagtgtgggtcaaacagctgtcccttttgctgtccaacaagctttacaatattagcaagaatccctaaattacgtaatcctaaaaagtcaatcttcagtaggcccagttcttccacgttgcccattggcaattgtgtaagttcaatctcttcaccgccactttgtaatgcaaccgtatcagttaacggtgcttggcttaacacaatcccagccgcatgcgttgagtagtgtcgtggcagtccttcaagtttctgtgctgtctcgaatagtaattgattttgagtggaatcggccaccaaatttttcaatggttgtgattgttgataagcttcttttaacgtgattttcagcatgtccggaattaccttagcccaatcattcatttcaaactgacttaagccaaacacacgccccacatcacgtaacgccattttagctgccagtgtaccaaatgtaataatttgcgccatatgattccgaccgtatttgtgatagacataggccagcacttcatcccgacgattatctgggatatccaaatcaatatctggcatattcgcccgattggggttcaaaaaacgttcaaacaacaattgatattgaatcggatcgacatcagtaatcattaaagcataggccaccaacgaccctgccgcagagcctcgccctgggcccgtcataatatgttgttcatgggcatgccgcatgacatcggcaacgattaagaaataatcggcaaagcccatctcgttgatcactcgcaattcatactgcaagcgttcttgatattcttgcggaatcgcttgatcggcaaaccgaacttgtaagccttgctgacttaactgttctagatatgccgttgccgactcttgatgcggtgtttcaaagcgtggtaattgggcccgcttaaaggtcaactcaacttgacagagttgggcaatcttatccgtattgtgcacggcctcgaccaactgcaatgcttcaaactcggccgtaatctgatcagcagtctgtaaataatagccgcctggcgttgtctgatcaccactatggagattaacttgcgtaccagctttaatatgttgtaagacttgcactgaaaaagcatcatctggttctagataacgaacatcacctaatgcaaccagcggaactccggtcgtctgactcaatgcaattaacccgctaagttggggggctgctgctcgcttggcactgattcctaagtacaagctccccggatcaactgccgcctggagttgcgtcaaatatgccgttgtttgctcctccgcttgcaaaagtaggcggactaattcgccatcttgagccggcgtgatcactactaaatggctgaaccactgtgtaatatcagcaaatgaaaccagatcagtttgagtcatcactttagaagaaagcttcaaaagattctgatagccaactaaatctttcgccaatacaattagcggaaaccgttcatcggtttgaagtaatccgccaatttcaagcgttaaacccaagattggatgtaagtcagctgccttggccgccttataaaaatcgactagcccataaatcacgttcttatccgtcagcgcaatactctgatagccgcgcgccttagcactttcaatcagtgcatcaattttagtggtactttccaagagcgtataggtactcttaacctgtagttgaacgaatggcaagcaacgccccttctttcttcgttaattcgattactcttagtataacaaattatttcaaatgattctctttggaaaacgtgttacaatatcatagaattgaatcaaagaaagaaggccaactatgaaatacgttatgaatctactttggacattgatttttgggtttgtcattggatttatcggttctaaactaacgaaaaccggctttaacattcaaacaactgttatcgtctcagttatttttgggcttttgctcaacttcttacctcttgtcttaccaaaagatccagctaaataaagcacaaaaaagggccgcaactttatgttgcggccctttttacgtttattttgtaatgtaaatatacaaatcacttgttgaaaaaccggtattgaacttcacaccatttgattcaatcgtcttcatcgtggtttgactaccttttttgtttttcttcgtataatcgctaaattcggacatcacttttttggaatcagcgcccgttgcttgcgcaatcaatgcaaaactggtcccaaaatctttcaatgccgctttatctttgagcgctttaacgggtgtaatgagcgtcatccccattacatcttgactatcaacagaaccgcgaatggtgacatgctttgttgcgacccattcagtcaccccatttttaggtgtggttggtagcaattgatccttttgtgtctgttgcacctgttgcattgctgcttgtacttcctgttgccgctgcttaagtgtcatcagatcagcaggtgcaagttggcctgctttggcagctgctgcttgtttttgcaattcctgcgctttggtttgatctgccttagataacgccatcccaattaaagcctggttgtattgcgcggcaatcttggcatattggccaactgatgtgcccgctgcaatcgttaccttcttttgaacggttttaccgtttgctttagcttgtaccgttactgtttgtttgttagtcgttgttggtacttgaatcacataagttccgtctttgaccgttgctttttggaaatgattatgattaatccggtattgtaaatcagcttttttggttgttgaaccttttacgactgccaccattccattttggcgataatttgttttagtcgttgttaatttggttgtcccacaaccagccaatagaccgattagccctaagctggtcactaaaccaacaattgtttttttcatattcgtcaccttttcattgaaatttaactcattgaaatcttagattaacccttttagaatcacaattcaagcgaaaacgacgaagtgtcacattttttaagaccaatcaaaaagagcgaccacttaacggccgctcttttaaaaacttattttaaatttgttttcttttcataacggttaaacatatataatgcaacaattgtgaagaagatagggccagcaactgaccagattgtttgacttaaattaccatcaattgctggttgaataatcgtaaagacgttcgcaaaaccaactgtgaacatgaccatgcagacacagaatttatagaaggtcttccctttataaattgtaaatggtttttcgatactttcatcctttttaaagccaaagtatgagtatgccacaaacatgtatggcaatgtcattgaaacgtttgtcatcgctgttaagatatcgaagaacttagcagcactcttaccaccaaaagcaacgaaggcaataatcacaattacaattgcagcttggaccttcattgcattgaccggcatattattactatttttcttagtaaatgacttaggccaaaaggcagcaggtgtcccttcgataattgtttttaatggtgagaaaataattgtaaagaaagccccactaagtgctaagaacattgaaagccccatgtaacgactgagccaaatcccaacttgaatagcagcatgttcacttaagtgcattgctaaccctaattggtaacccatgttgttcatggcaatataagcaacgttccccaaagtaacggttgcgtttgaaccggttgctttggcgaagccaccaccattggtaaagacgaagttccagttagtgaaagtccccatcataaagatcccaacagcatagccgacaacaatcacgacagcagaaatagctaacccttttggaaagttaaccttagcgttttcagtttcatctactaatccaccaacaacttcaagaccaccataagcgaagatcgcaaatacaacgaaactgaagacttgaatcatcgatgtatagctttgatttggtgattggaagaatgcatgggttgtaacaggttgtgccattacccctttatttaaaacaaggattaacaaaccacccaagaataaaatcacgttgattaacgtaatggctgaaccaccaatactggtgattctcttgattttatcaaggccttttgatgtgacaaaggtaatgacaatgatccaaataatagctaaaattcctaatgtttgcacaccatttgtcaaaccaaagattgaccattcttgtgttttatcaaccccgaaaaaggcgtttgataatggaatccaaatcccgttcccgacgttaaccatccagataatgtatgaagcaaaccacataaatgtgccgacaaaggcaaatttagcgttaacggatttctccatccaagagtaaatccccccctttgcttcaccaaaggccgctcccatttctccgagcataaatgcataaggaataaagaaggtaacagctgctaaaacataccaaaaaattgatgcatatcccatcaagtagaacgcacgtgggatattcgtaaatccaaagactgacgtaaagaccattagaataagcgcaccaagcgttaacttattcgtcttcttcttttctgccacctaaaacacctctttcatttttttcagacttaaccacaatgattaatcctctgaataaaaattagttaactaacatttgttaataaactaattagttacctttattttacggcgaaaatagaaagaggtaaacgaattcattatttttgtaattgaattatttgtgaatcttaattcaattctcattttctagtcaattacttattttttgctggcgttttttcttcaactggttctttcttcaaagtaatcccaattgcaatcttatataccacactctgacatgctaatttcagcaatgtttgttgggtttcagtgaccaatgtacctgctggatttttgccttggtcataggggctgtaatcctcatctaactgatgaatcgctgctaaaaacgttaagataaagtaatcataaagttgcttttcatttcggttaggtgtttccgctgtcatcaattgtttgatttcttcaatcgaaaaactcgttttcaatagtgcaataattaaaacttgagcaatttgcgattttgtataccgttttttaatcggtgctgccacaatttcttttttgacgtaattattaatcattgaagcggtgatttcatctaaatttaacgcgtttaggtattgattgatgtaactaaccacttgatccatatatagttccaaatcgggcaggtctgtccaacgtggtaagcgtacaatttgtaaacgatcgagcttttgtttcaagtgttcatttttcataattatcaatctccttttattcaatactcattataccaccatctagtatttaaaactaggaaactgcataaaaaaagagtttcttattcagaaactctcgatgacgattagtcgttagcttttggtgtaacaacttgttcgcctttatagaaaccttttggtgatacacggtgacttacacggtattcgccattagttgcatcgaattgtacgtttggtgtgttcaatttgatatgtccacgacgcatacgtttcttcgtctttgatgttcttcttgctggaactgccattattttcagactcctttatatcttagattcattaatgatataccgaactcggggaatttggcaaggattatctcaatcccattcaaattgattttaaatcatcacgtgtcccgctacttttgtccgcgacttctataatactatgtttatccgctaagagcaagtcaattacagaaaaacaattgattaacgactcttaatgacaccactttcaaagtggaatcgtccttaatcgtcactaacattctgtacatcatccctaataagtgtaccatacaaacatcaatctgacagtaataatccctgattgatgtccaaaaaaagcgccgcaaattaaatttgtagcgctttttcaatcgttagcgattttcaaaaactaactggttatcttttaagttaatttcaaccgtggttcctggtaacatatgcccggcaataatttctttagccaatggggtttcgatatggttcgtaataaaacgccgtaatggccgcgccccaaatgcaggatcgtaaccttcttctgccacccattgtttagcagcatctgaaatcgtcaatgtcaattcttgatctgacaaacggtctgatagatcatgaagcattttgaccacaatcgcttgaatatcgttcaagctcaatggtgtaaacataattgtatcatcaattcgattcaagaattctggcttgaatttcgtctgaattaaggcttgaacactttccttagccgtttgtgaaacttgaccttcttcatctacaccgtccagtaggatttcagaacccaagttagaagtcataatgatgattgtattcttaaagtcaaccgtccgtccttgtgaatctgtcaaacgaccgtcatccaacacttgtaataaaatgttaaagacatctggatgggctttttcaatttcatccaataacacaattgtgtatggattccgccgaactgcttcagttaattggccaccttcttcatagccaacatagcccggtgcggcaccgaccaatcgtgatacagaatatttttccatatattcactcatatcaatgcggaccatatgccgttcagaatcaaataaatcctcagctaaagcttttgctaattcggtcttcccaacccctgttggtcctaagaagaggaatgagccaagcggacggtctggattttgtaagccagcccgtgaacgtaatacagcatctgtcacagcattgacagcttgatcttgaccaattacccgttcatgcagaacatcggcaagacgcagtaatttttgtcgatcaccggcaactaatttggcgactggaatcccagtttgggaactaaccaccgttgcaatttcattttcagtaacggattcctgaaccatccagtcctctggcttttcagccttttcaaggtcggcaaggtcttcttctaattgtggaattgtgccgtgttgcaacttagcagccgtttctaaatcataatttccctgtgcttcttctaattgccgtttagcagcatcaatttccgcttttttatcattaatgcggttcaaatcttctttttcagtttcccaccgcatctttaaattattcgttgtttcgcgtaaatcagctaattgtttttgcgtctcagccaatcgtttttgcgaagcggcgtcggtttctttctttaacgcttcttcttcaatttcaagttgcattaattgccgcgttgcttgatccaattccgttggttgtgaattcatttcgacgttaatgttggcactggcttcatctactaagtcgattgccttatccggtaagaatcgatccgtaatgtagcgatttgacaacgtcgcagctgcgactaaggcattatcgtgaatccggacaccgtggaaaatttcaaaccgttccttcaaaccacgtaaaatactgatggtatcttcaacggatggttcttgaactagcactttttggaaacgccgttcaagcgccttatctttttcgatattttgccggtattcatccaacgttgtcgcaccaatcatgtgtaattcaccacgcgctaacattggtttcaagaggttcccagcatccatgctaccttcagtcttaccagcaccaacaatcgtgtgaatttcatcaatgaagaccagaatccgaccttcactcttcttaacttcctttaacacagctttaagtcgttcttcaaattcaccccggtatttggccccggcgattaaagtccccatatccagtgaaataattgtcttatcttttaaattatcgggcacatctttacggacgattcgttgcgctaatccttcaacaatcgccgttttcccgacaccaggttccccaattaaaacggggttattcttggttttccgtgacaaaatccgaataacatctcgaatttcttcgtcccggccaataactggatccattttgccagaacggaccgctttgattaaatccgttccgtatttttcaagcgcttggtaattatcttcttggtttttagatgtcacacgctcgcctcctcgtaaatcagtaatgactttctttaatttttgttcagtgacattttgtttctgtaaatattgaacgagtgcctggtatttcaaacccattaagcccaagatgaccgtctcagttgataaaaattcatcttggaattctgttttgtatttttcagcagcagttaatacttggtacaagttttgtgagatgttttgaccgtaattcgtttgaccttcaaccgttggaattgcgtcaatttcacgatcaatctccgcctcaagagcatcgatatctgcaccggcttcttggtaaatttgccgtcctagttgttgtggttggactaaatatttaaagaggtgtggaatatcaatttcagtttgatgacgcgtcatcgcgattttctgcgcttctgcaagtgcatcttggacagcttgtgtcatttgttctggattcatagacgtcattcctttttcagttattttttaaattaagtgtcagattattctgactaattctataatagtcaaaataggtcaaactttcaagtaattcgcttataaatcagacttaagacggagagctggtaggcgagttcttcctgaaaagtaacacaaaaaaagaggctaagacaaaatctgtctctgaagtgaacccccgatattggaccaaaatccaatatcgggggtttttatattgaccaaatattctaaaacattaaaaatcgtaaattgcaagaacaagttagccagtcgttgaggacaatcccagaacaggccgttatcaaatagaagttgtggcgctagagagactactgggccatgcggcgaacgcgccgagcttcggcctcaaagttttgctggggtgtgcagtagccctgttgtttgcgaggcaactgattcaagcggtcttgcgtggcctgcacttgactctagggctaatgtcatctagggacatgcccttagggaagtcctggcggatcatccggttatgtgcctcgttggtgccacggtcgcaggacgtgtaaggatgggcgtagaagatctcagtttccgtcccagcaaaagcagtatttaaggcggtgaactcgggtccgttgtcggctgtgatggtcttgatgcaagctccccattcgcgcttgattccacgcaatgcatagctcacagagtctgcatctcgtccttcgatcaagcggagaagttggcaacgggtcttgcgctcaatcagagtcaagatgacgctctccttgccattgcgtttaccgacaatggtatccatctcccagtgaccgaactgcctgcgtcgttcaacgaccttaggccgttcctcgatactgcggccagccaggcgcttagccttggtgtggtgctggtgagaggtcttccgcttagtcttctccaacaggtcgatatttcgaatctctaggcgttggtcgtcaatgtactggtacaaagtcgaggcacaaacaagctcttcaggagtaaacagcttgtgtcgcttggcatagccgattgaagcatccggcgaccatttgtcctgcttagctcgctgtacgtaccaggctaagaagacctgtacgctggcgaacttgtcaggacgatggcagctcaagcgtgcagtctcgtaacgtgcctgagcagcctctggcaggtattgtcgatggtagacgcgcttgccattactcttcttgacctgatctactgtacctcgcttgatttcattattaatggtctgcgggcagacgccaatttcagcagcaatccaacgattggacttcccagcttggcggaatccggccacttttccgcgctcgagtgatgttaagtgctgacctttttggcggtgtgtggtatcctgtttctgcatcaagacaatatcctcttccattgtttgtgtaggaacttcaatgatacaggatatctgttcttgatgttttttattgtaccaaagtaattactccctatattggttggaattagctactaccattgtaagtgattgctttgggctttttaatttctgttcggattaattatagaatttgccagataaaaagaagtgtgattatggcgctacaaaaaactatcaatgtattacgcgctaggggttattttcaccacataaaatcgtccatattatgactatgtttgctttttcgtagcgaacttgtaaataatgtgatctaattaaatttatatattatgatcgtccctctgaacgcttagctgccaacaatttattattttcgataattgccgccccaacaactgctattcgtttcttcatactgaatacctctcacgtcatatgtttgtattcattttagcagtattgtatgaaaaatttcatcttaactaaccttggacaaaaaaagcgaaccacaatggttcgctgcaactaacactattcatctgctctagactttttttgaaaaagctcagtttcaacttcttcaggtaactttcccataaaataatcttctatttgatcccagaaccaatccgtatatttttctacgagttctttcccagaattgccattttctttgtgagtaaataagaaacgctgcataagtacgccaattcgatgcttcaacattacatcttctagtataaagtttctgtatttttgatctgctttaatggcctgttctactggataaaccgaattaattcgaatgtatatttgaggattatatccgccgagagttgtgtagcttcctaattcaaaagcttctccaattcccaaaactatcatttcttcagaaaattcttcagaattcctatagtggaatatattcattgagccttcatcctcaaagtaactgtacttgggatgatatatcctattagtaactccactaacaaaatcataaaaaatgtctccagatctgataaccccaaagcgagtcttctccccgacaactcgctctttcaaaactttcacatctttgagtttttgatactcaaaagttgcattgataagaacttgcgctaagcttcttgctttaaaggggtcgctaatacgtaagttgtttctaacgaattcgcctaactctttagcatcaaattgtttgttagttcgttgtttagtatctaaaaatcgtaagtaagtttccataattgatttatacttagcctgttttgtactattttgatcatcgaactcatattgaacaccgctcgcgaacacaaacagactaaacaacttcgaatggcgtaatttttcacgctcatcaggtgtgtttaatttgtacttaaactcaggaaacgacattttcttataatggtcctcccaaatacctgaaagatctatggacaatacagaagcatagtttcctccatggagtgacgcgacgtattccacataattacgcaacgaagaactttcaagcgtgttctgaacctctttagtagctaagattaattccttaccaaaaatacttctcggtcttgcaacgaatggagagtaacccagcttacggcttgaggaaaaatctttttcaatcatcagcaataccgttttaactttgttgtctaaattgttgttatcatcgtccaagttatccgagaagatatacttaaagtcatcagcattcacgacaatattacgattatttccttttgcccggtatatatctagaactttttgcatcacggcttgaatttgattttttctaatcgcgctcattccctgcaatttctttaccgcgttcaaatcttgaggcagaaaatccaaaacgccaaatcccctgggcacgagttgatgatttcttgcaactcgtcctatttcctgaatgtaatcaacaacattcccggttggattaaagtgataaacatttgtaatgtctggaatatcaattcccattccaaaagcttttgttgcgagaacaaattgaatttctccagttttatactcatctaaaacggcatccttctcttccttagtgagcgtaccgtaatatcggccagtaaccttggctatactaggtgcatttgtttcgacgaattggtaaaatccgttcaacaaagatatcgtaggaaagtacattaacgatttttgtcctctctttgaagcattttgcagatactttaaggcaagaacgttcttcgtcttacgatagtctctatccttatcgtcggcggatgatgataccttcataaaaatatcgtttcgtcgaaccacaccgaaataagcaatcggccggaccatattcagactattgcgtgtatccatgtacatgtcttctctaccaccataaatagcagtagcagtaaatgtaacaatcggaaactgaaattctttacgcagtttttgaagatatatacccaaataccaatagtccgctctgaatgattttccccacgttgttacaatgtgggcttcatcgacaatcaccattccaatttttcgatcgccaattaacatcttaatatcacctcttgcctgaagcgtttcaggtgagaggtacagcatgtcaacagttccatctgctactttttgtaaaatgttctgtttttcatacggaggagtattaccatttattgtctctgcattttcaacgccttttgctttcatgctatcgacttggtcattcatcaaaccaataagcggcgatattactagcactaatggcttatcatcttgatatttttcagttaagtatagtgttggtacctgaaacatcactgattttcctgccccagttgatgcagtgatatacacatcacgatagtcattaccccctcgggcctgctcagcctgttgtacgatatcatctataatttgagcttgtgatattttaattaacttcttatctctcttctcaatcgtggcatacatttctaggtctctgaagtcatcatacccccaaacttttttaagtatctgtcgatattcattaagtctctcaatgtcatttcgttttattgattgtgtagaaaagtaaacttcccagtccggatgtaactccttcattacagaaatacggtgaatatatcgatgcgggatctgatccaacgattcaatcacaaagttaacagagttagaataatcttgttcaatttcaaaatccaaaaacgccgtctcttcttcatccagagccatcgtaatatcggccgttggattagaaaccaactgaggaacaacgtcattttccaatccactgatatcaaataccgggtacccatcccacaaatccgttttatatgatatataatattcgtttgactttttagaatagtctatcccgccgtaaaaggtattaattcgttcaaccttaagtttgtctgttccttctatttctgtatcttcactcaaataaagcatttcatatgctttctgaacatctgataaagaatcatcgtaagggtacttagtatcgaacaaatcattcttaatgacaactttatccttaggatacataacacccacaagttctgatattaaactaaattcttcaggtcgaactatatagtaaggcaaacctttagccatacttgccatggcttcactaaataccttagcttttctatcatccaaatcaattagatcgagcttttgatcaataggagtaatgaaccaattgtcaaaactttcctgaccaaatccaaccaatattaccaatggggtgtctaaattattttcactgatgatactttcaattctgttattaagatccataataatccattctctccacgctactcttccacttcaatccaatctttaatttgttttgcatttactggatttcttaatcgtcgaagcgccttcccttcaatctgtcttattctttctcgagtcactcccattttttgacctacctgttccaaagtatgaatactcgagttttctaatccaaatcgcattattatcacttcacgctctcgatctgtcaattcaagcagtagctcgttcaacctcttactaagctcattatctgacactatgtcaaattcgctttttacatcatcctctggaattagctcacccaaagttgtatcactttcggcagaaccaaccggtaaatccaaggacacaagattgcttccaaatctatattgaacttttttataaccaacaaccttatccacatcaatgttcataaacgccgcaacctcatcatcagttgccggtcgtgataggtctttgaataacttattttcggcattgcgctctttattaagcacttctctcatgtgaacaggcagtctgactattgttgactgatcggctataccacgagtaatagcttgtctaatccaccaggttgcataagtcgaaaattcatatcccaatgatgaatcgaatttttctgcagccctcttcagccccagcataccttctacaatcatgtcatcaaagtcataactagccgttgtttgtcctgtatattttttggctatacttgccactaatttctcatttgccctcatcaatgagtctagcgcccgtgtgctgtctgatttttgatattcgtcaatgtaatttgaattattagaaaaatcaggtgtttctgcgacattcttatactgatcatcaaatttttctgaactcaaaacatcatcaaggtcttcaaagtcatcgaaatcgtcaaaataatcgggatcttcagaaatcacattatcaagcaagtgcccgctatctgatttgctttgaattttggcctttcgatagacaccatcagagacaaatgttatttctcctttgtctctcaattgctgcaaaacttgtctaatcttagccctaacattttgattttcactatgtatctgtcctaaatcacggtcaaataaatatacatccgataatgtaaattcttcaggtaatccttgaagcaaatttttcatgtcatcctgccaagataaacccgcattgtgtataacattctttaaagacgaaggctcatcttcaatgatcaccaaattcatatcagacgcctctttatatattcgatatgaaaaattaagatcattttgggattgcccaataagttcatttattgcgcttcgttttatttcgcttccccatcgaacattatcattcatgtagtcaatgattttttctatgtccatttcacttcacccaaactatttattactccacaaattctattagatcacaaaatttaatacttaactacgcgtggtgctagtttattaacgttcctgttatctacacgattttcaacccgctgatgtgatgcatgagattgtcgtgaaccttgatggtgtgccataaaagcatcatctcaattagggcttcgagcccaaccgctgtgcgaacatgcggatgttcaaatgcggcaaccgtattcaagttattgaacatcgtttcaatatgtcggcgctgtctctttaacagcgttatatcaacgttcaccggttgcttcatgttcttacgcaatggcgtccaaatattgatacctttcgttgaaagttgctgtttcaagtctttacttagataaccaacgtcagttaaaactcgcgatgaactagcttgttctaacaattcttctgcgactctaacatcatgtatggacgctttggttacttcatagcccgccacatagccttcattcgtcatgacacaatgaaacttgaacccgtaaaagtgcaggtgtttagtagcgttgaagccaatgtttgcgacatcgtgaaaaaccttagcctgcatatttctaactggtgcacacaacaatataggcgcactatcaatcacggaatatgcagtatgacgcgtccaacgttgaagcatatcgtttcgaattgtcttcatgtccttagcgagatcatgacaacgacggctaaaacgtgagcattcaggaattttaatcccatacgtaaccatttcgcggtgaaattgacgttgtgacacagttcggcgttcgatttgaaacatcatcaacgctaaaatctgtaaatcagagacaattagctgcttgtgattacgacgttggcgaacatcaatacttaaacgattgtaaaaaggactaagaatttcaacgtacacattgatgcaggcttgaattggattcaaaacggcgatattctggtgttggcttgacatcagagccttacataggaaattaattattgtccttaaaagaacttactttcattaaccaatcaacgcttacaaaataagggttgttgtcatccttttctttttcgattaatataacatcatcatgtctcgctgctacataaaaaacgtcccctgaagaaaatataagacctttgtcatccttaccgtctattatgaatttgtatgctggtagaacttttgaagtagatttttctttattatccttcttaactagcttccttaccttcttaccacctgcttcaacaccacgaattattacatagccacctgctgccacaagagcaaggagttgctttggaccgcctaccttttttgcaactgttgtcattaattgataccatccaaggtttcccattttaattacctcactttaataattttttccaattgagtactgacattgttcctaaaatagtccctgcgataggaactagagcggcaaatacagagactagagctcctcctgtcactccacccgctgccgaagcagcaacttgttcgatagatttttgaacttcttcgtaagtgtcatcgtcaatccccacatcgctatctaaaagaatagtgctcttatgctagatttacggacagattttcttctgccctgtaaactaattgcatatgatcaactcttatctcttatatatttaatacaaatgttagcaaattttagcttgataagtcactaaagtatcgcttgagtctagttagggcattagtttaaccaaaatcaatttgatctaacatagtctctcgacttgcttgatccaagccaagataagtgagcgtcatggcctcacttgagtgattcaataaatgcatgactaagccgatattgtaatttgattgcgtataaacacgataagcacctgttttacgcatggtatgtgtacctagatagttgatgcctaatagatcaccaacgcgtgccataatcttgtaaaactgcttctcagtaatgtgacggtctgaatgggccgttgagggaaataaccaatccgaattaatgttttcttgtaccagccaatcatgatattgcagcaagtcttgttgcacgggctttaaatataatgtatttgctttaccagtctttttatcatgaataaaggccgtgtgtttaacagagccatctggattatagacatcggatttctttaacgtcatcacatcactcacccgcagcaaggtggccttgccgacttgaaagatagtgtagttacggcgacccgcccgaaaactatctaataaggtgtcttgtaccatttttaagacgttagagtcttttattggcagcacgatttgtgttgaaccatagattaacctttccagcttcttttttagggttattatatcatttataaaaaaaaagtccctattatctaatcactagataatgggggctgttttaatagtattctttaggggttattatgtaaatagcaacaaatatgaaaccgataatagacagtttaattattatgaataaacatttattacatagcatattataattcgtgtataattaaagaaccactcttattaactttttattcattgtttttcatattcatgtgaattgagaggaaaatttacttaaggagtaattatgaaactaagtagaaataccgtcattatggttgcagttctttcgctgttaggaattttcgttattatttttattttttttggacgtacacatacgacgaataagactcaaagactttaccgcattatgactacttcgacatcttcattgagtttaacgggtaaggtcgaatcagcggatgttcgcacattaaaattaccatccacaaacatttctaaattaatgattaaaagtggcgattacgttacagctaatcaagaattgttaacaacctttgatgacaaaacaggtgacatacagaagcagaaacaagaaattgacaagcaatcacgtctaataacccagtacacaaatcagttagctaatttaaaatctcaggcgacatctgaaaattcagttcaagatgcttcaacatcaattgcacaagttaacgactcgttaattgatgcgcaaactgatcttcaaaatatgaaaaatgacttgaataacacaataacttctcagtacaacgtcctaaaatctccaattgacggaagaattagtgtgcattttaaagatggtattccgtcattgacggtatattcaaattccaaaaacgcagtaggtgacgtatcggaatatgattactatgatttgatgaatagttctacagttaaaattgttgctcctgctacaaacaagacgacaagcaccactgtcggtgaactgaatttcgtatcaaatgatactagtaaaaatggtcaggctgaatactcattttcagcaccgatttcgtcagagtatctggatggacaaacattaaaaatattgtctactcatccaggaataagaattccgacgacctctgttgttgccaaaaagtatgtttatgtctacaaaaatgatggaaaagtatccaaggtccctattacgtacagcgagaaaaatggctatgcaattgttaattctggcttgcctgaaaatgtgaagataataacggatccggattcaaatttgagaaacaacaagaaggtaggtatacatgattgaaatcactaaacttattaagtcgtattaccgtggatcaaatcaaaatccagttttaaagtctattaatttatcgatatctaaaggtgagtttttatctattgttgggaaatctggtgcgggaaagtcaactcttataaatattttaggattgttagatgctgaattttcaggtcaatatcattttttagggttggatattagggagctatctgacaatcagttatcagaattaagaaacacaagcatagggtttgtgtttcaaaattttaaattaatcgagaatttgtctgtgtatgaaaatatagttctcccattgttatatgcagggaaaagtcgatctacattgcgaaaggtggtttctgaaacgcttgatcttgttgatttgcccaatttagaaagtaaacggccgaatgaactatcagggggacagcaacaacgagtggcgatcgcaagagcaataattatggacccagaaattattattgccgatgagccaacgggagctttagatagtaaaacttcccgagatataatgaatatcttcaaaaaaattaatgataagcgtaaaacgactatcattatggtcactcatgatttgcaacttgcccagcaaacaaacagaattattactatttcagatggcgctattttatctgatacaggaaggaattcatgacatgaaagtgattgaagtgttgttgacggcatggaagtccatacaaactaatctaaagagaagtttacttacaatggttggaatcaccattggaattgcttcggtcgtcgtgatcgtatccttggggaatggaattaagaaagagacgctaaagaatctacaagcagatagctcagggcgtcagactatagaaataacgtacacggataagaatcctaattcctataggcgaggattttctactgaagatatagagcttttaaaacagtctgacgaatctattgataaaatttcaattttggataataagaattcgttttcaaataaattaattattaacgggcaattgaaatccgcaacattccatttaactaaaaaagcgactaacgaaaatattattgtcggttctaacctttctaaggctcaagtaaattcatttcaacccatggcaatgatttccgattccgtcgcaaaaaagtattatgattctccgtctaatgcgctcaattcgtctttatcagtcgataatacgacatatactgtaacgggtgtctttaaaaataaaaaaaatgatggtctttcaacagacgtaatactgcccttaacgacatataaatctgcacagacaaaatcaactggagacacaattaaagtaacctttcaaagaaatgttaatatcgaaaaggccgcaaaaaacgtagtaaaaaatttaaacaagaatggcagccaaaaaactaatggtaaatatgaatatatagacatcggctcattacttagtggtgtaagcaatgttatctcaggaataacatatttcattagtgctatagcggggatatccttatttattgcgggaattggtgtcatgaatatgttgtatatatctgtatcagaaaggacgaaggaaataggagtacgtagggcaattggagcaaagaaaaaagaaatcatgattcaatttttgttagaggcggtaattttaactactttaggagggttacttggttttataatgggagcgggtctggcaatgattatttcccaattcttaccatttccggcagttattactgcgtcgtcttttgtcacatcgtttgtaatttctaccgtcgttggggtgatatttggaatattgccagccagacaagcggcggataaaaatttgattgacattttaaaataaaacttatttaaatgtcgatatgtaaaatgtagctaagagcagcaagaatcaatgtaacagattgttatattgattcttgctgcttttgcaaatctatacagtactatgttaatacaataacgttgagtgctttggaaagtagtcagacggtaaaatacaatataaacgaaaaaagcactaattggttcgccaaaaccaattagtgctatcggatacagtgattaggccactgtaacgacttgtcattttcggattaaccgaccatcaaattaagttattaggtccctcgggacctaatttcaaagcccgttaatcaagttatagcccctaaacaaacatcttttgtaaaaagccttttttctgttctttcaacaaatctaacttacgttgatgaagagtgatagtgttatctaactgtttgaagaatgaaccgattttttgttgttcttcataactgggaacagaagcaccaacactattaattacagttttcgataaactaggtacaccagtagattcatcaaattttttccaatttatttttttaaaaatagatagtgaaaattgaaggtcaatattttgtttaggaacagcgtaaaacaaggtatcgacagtccaaaaaggcgcttttaataaataaggcttatcaattgtccctttccttccgatcccaatggcatctatatctgatagcgctctatctacacttagcatatatccaccagttccatagacaggtattgatcccgaattcagatgtttgtagtcttttccagacttaacatcaataaaatcacctaacttacgctcttcccaatcgtcagcaaaccccgcaaatcgcaattcaggaactttttcaccatttttagggaacattttttgcaagtagccttttttctgttccttgagcaaatctaacttacgctggttagcagcgataaggttatcgagcttttcaaagaattcacccaacttggtttgttcttccggtgagggtagtgtaattggtgtttctaaaatatttttacaatctaccatttccacaagatagctttagcaatttcattcatactattaacttaataactataacaaactcttcattaaatacaaagattaatcgatattacacgcttctatatttgttgtacaattatctcattacgagtccaattgaggagcacccattcaatgcagtattttaaaatcctatttacaagtacattcacttttttaaagcagtcccaggcctattttcgtagtgtgttattgatgcatggctttttgcttttaatttgtctaccgcttttgagtaaagccagctacttcattctggtacataatcagatccagtttctcgcgttgagcaacttgccagcgcttattcatcagcatccgattgcgctgttagcactcgtaggaattgcgctactaattttattgctggctttcttcgaattcacgtttcttctattaagtgtgtactttattcagattaaacggccgctagctttgcaggcattgctgaagatgacttttgcgcaactcaggcaccttcgaattggcacgttctttttctttctatattattgtcttttaattttaccgctgggcgggcttggctatcattctgatttattgactaagtttaaaataccggcattcattctggattatattctcatgaatcggcgaattgtcgcgggacttttcattcttgtctatttgggcttattatatctcggcttacggctgatcttcaccctaccaaacatcattcttcagcagatgactttcaaaaaagcgttgaccagtagttggcagtttacacatcaaaaaattggctcattactggggcgtctactcttaatcggtgccgcactgattggctttacgggactcacttttttcctactcatccaactacaagcgttgattgaaacccacacatcagtgggactgccaagtgccgtggtcatcatgaccttgttgcaagctgctatgctcatcaacttggtgctttcaacagtcgccgtctttttcatcgtcattgattatttgttggccgacccacaatttgtgcaaccgacgttcaactatgcaaccttaaaattaagcgtgcagctcagtggtcgttggttattattcgtagcaaattgcgttttaatcggcgttgggacttataattgggactatctccgttcagtaaccattcagcagccgctaagcatttcccaccgtggcgtttcgcaaaaagacggcgtccaaaattcgattagtgcgctgcgaaaaactacccgattaaagcccgattatgttgaaatggatgtgcaattgactaaagatcaccaattcgtcgtctttcacgacttccaacttgccccactcactgggcactcagggaccccgcagtctaaaacactggcgcaactgactaaaatgaccgtccatgaacatcggcaatccgcaccaattgcttcatttgatgactatcttgcacgcgccaatcagcttcatcaaaaactactgattgaaattaagacacccaccaccgataatcccggcttggtgcaacatttcctgaataagtatcaggccaatatcgaagctcacggtcacatggtgcaatccttaaactggcacatcgtcgaggccgttaaaaaggcagcaccgaagattcaaacgggctacattctcccctttaattttatcggcccaccaatttcgaacgctgatttttatgccgttgaaatgacaactgtcaacagtcacttcattcaagctgcacatcaggaaaataaggccgtctttgtctggacacccaatgatcaacaagccgtccaacgcatgatgtatttcggtgcagacggcgtggtcaccgacaatctcaccgcggttaagcaagctaaacaacaaaataaccaacgacactacgccgataaactcgcatattatgtgatcggtattgggtaatatagtaaaaaaggattgggaatcgatatttttatcgatccacaatccttttttattagcgattctttctaagccaacgtcttacacttgaatagccaagcgtaagccccgttaagagcaatacaccagctgaatacacgaatccaatgacaatcaccgtcttcatcaagcctatttggcgaaccatgtcagcacaaaaagcagccatcaatcttcaattgacagctgcttgcactttatttgtctaaaagtcgttgtgctttttgggcggcgacgttcatgatgttccaaggacggtcaaaacctggttggaagaagaagtcagcgtatgctaaatcatcgattgtcatcttaccttgaatggcaagtgaaatggcgttgatgtttgccgtcacgtcagctttagacatgatttgcgcaccgagtacacgccgtgtttctggatcaaaggttaatttgaaatcgaccactggattttctgcttcagggacgaagtgtgggcgatatgtttcagaaaccaaaacagattgggtcttcacacccattttatcagccgttccttctttaatcccagttgaagcaaagtgataatcgaagacgctcaatgctgatgaacctgaaacagcgggtaccggttggttggcggtgactaagttcttagcagcatagcgaccttggcgacgcgcattcgttgctaaagcaattggcatttctttgccagttggtgcgtatttcacaaccgttgcatccccgactgcaaaaatatcgggttggcttgtttgtaagaattcattgatttcaatccggccgctgcggtcgagttgtaatgtatcttttaaccagcctgtgttaggccgaatcccagcagcttcgatgactaagtcagcatcgtattcagcttgatcggtcacaactttagttagcttaccgtcaacgccgacatattctttgacgccttgaccaactgcaggatagatattgtgcgcttgcatttcagccgttaattgatctgtaaattcttgatcgagatagagacttaatagacgtggcaagacatcaacaactgtaacatgtttgccagctttagcaaatgcttcagccgcttcaatgccaatataaccagaaccgatcaccacaacatttttaacggttggatcaactgtcttcgcctttaatttaatcgcccaatcacggccacgcattgcgtagacattctctaaatcacggcctggcactggtaattcaaatggtacagcgccgacactcaagactaacttatcgtaactttcttcacgcgttgtattattctttaaatccttcacttggaccgtatgttgatcggcgttaatcgcggtgattgcttgttgtaggttgacttcaatcccttttgcccgcatgccttctggtgtcgcataactgacatcatcaacgtttttgacggtcccttctaaatagagttgcatcccgcaggataagaacgataggaaatcgccttgttcgtaccattggatggttgcatccggataatcgagtaaactttcttgaacagtttcaaatccaccatgagatgaaccgacaacgataattttcacattgatcactccttattctattttacacaactcaagtataacgcagatgatattaattacaaataaaaacgcattctcggctgactttcaactgaccattcttaaattccatgctagaatagtgacaagctttacaataaaaaaacaatggagattgctatggcctttatcaaacgaaacttccccacttttatctatctagcaacactttatctcacctatcagattctaaatactttgattcgcatctttaccagtaccgatattctcgtctacgccaaagaatcattaactattttcatcgttttcttcggtattttctatttctcatatatattgttcggcgttggcttattatacgctggccacgtcatttcgaaacaatcgggcaactacgaaatttcactcatgattttaaacatcctcaccacttttagtacccttaccacgattattttaaaattttctggggcgcagatgccgcgtttcttactttcaaccacttttttcatcattttgaccaccatctcattagccacaacttccaaactgctacaactgcgcaccaagcgaattgacaataagtgactgccaaaggtgaagtagcgtctttttatgttaaggaaacatttttcatgaacggtaaaattgattactaccaactctttcaaacaatgtatcggcaatatgggccgcaacactggtggccttctgattcccattgggaaacaatggttggcgcggttctagttcaaaatacaaactggcaaaatgttgaccgctcgctcgccaatctacgatcaagtacgcacttcgagccaaacaatctgctttctctttcggatgaagcccttatgttggctattaaacccagcggcttcaataacgctaaaagcaggacaattaaagggctgtttcgatttttagcgacagttgattttgacttagacacgctcaatcagatgacaaccaccactgacctacggcgccagttacttgccatcaaaggcattggtccggaaacagccgatgtcattttattatatgtcttcgaccgcccagtctttatcgctgatttatatgcccgccgcttaattgctcacctagagcactgttctttaaaagacctccactatttaaaggtacaacaggttattgaaccacagctcttaccccaaatgactgttaaagactgccaagaatttcacgccctaattgacgatcatggtccagcctttcttgcagcacaaaaataagccggcatccgtttttagacggatgccggctttttaattatccaacaacccctttgcttgtatcagctgggtggaagagttggtcaataatacccgaaacgcgggttaaatcaacattcccgcctgaaactaaagccacaatatttttatctgttaaccattgaggatcaattttaccactcagcagtgctgccgttggtaatgcaccagcgccttctgtgacaatcttagtccgttgcatgagatccttcatcgcagttgcgatttctttttcggaaactaaaatcatttcatcgactagattttgaaccactgggaaagtcagttcacctggaatcgcaacgtctgtcccatcggctagcgtgaagtccgcatgatggctggtgattgtgcctgcttcaaatgaagccgtcatcccgtgcacgttttccgattgaaccccaatgatgtgaattgaggggttaaaggatttcaaagccgtcgcaatgccggagattaagccaccaccgccaaccggtacaatcaccgtatcaacattccaaatcgcatccaaaatctcaaggccgattgtcccttggccggccatgacttcgcgatcgtcgtaggggtggacaattgttaagcccttttcggctgctaactgctccatgtacaaccgcgaatcattaaaagtcgtaccatgtaaaacaacgttcgccccataaccggcggtcgcttgttgcttagcaagcggtgcttcttctggcatcacaacggtcgcatcaatccctaataacttcgcggtcaatgcaaccccttgcgcatgattgccggctgaagctgtaatgatgcctttagcccgttgctctggcgttaaatggttaattttattgttcgcaccacggaatttaaacgatcccgtcagctgcatattttccaatttcaaatagacatgaccgtgcgccacattacgactcaagaacatcgattgaattaaaggtgtttcgcgaatatacggtttaatggttgcccgtgcttcctcaatatcccggatatcgcaaatgtctgcggtttttaatactaattgattcgttgccattctggccacctcttccatttgaattgacacaaatgtctgcggataggttgtgctatccttcacaattaaatgtaagccacttatcaagcattgtcaaaacaaaacggccttaaattagaacgctttcatttggtggttattaagttctcattctagttgtttaaccagcaagatagcactagagtagccatgaaataaaatgatgaggtgttcaacatgaccaaatcagtcgttaactttttagctgtcattataatcgttcatttaaatcattttatctacaatgtgctattaaaaatagattaacgagcatatggagcactattgaacatctaatatccttcgtccaaaaataggtactgcccaatatccatccaaatgaacaataaataagccaattatagtcaattttcagctgatgcgcgcacccaaaagcaagccctgatacaataattttcatcaccgtatcgcattcgtttttttaataaaaaagagattaaagaaaataccagaaataataattcttctagtgttggtgcaaacaaatcattgctgagtgtcgtcaaaatcggaacagccttcattagctcattaatatagacttgattctccggcagcgctaatgggttccaacgtttatcgatccgatcaatcactagcacaataccaaacatcactaaaataagtacaactttctttagcatcggctctctttacacattttgccagtcaggttttggttgtctcatataaattctagtaaacaaaaagactattattagccacaccccaaaattaacagcaatcaatgctggttcatgcgtcgtcatataatttgtactcaacccgaaaagggcttccatatggacgaacatcattaatatcaataaaactataaaaaagctaatccgatggcataacgttccgatcttcaacaatttctttctggatcccctactaaactaataaccatatctaatcatcgataatgccgtcatttcttttaacttagcttgttgactggctgatagatccaagccttctttttgaatcacattcgcaattgcgatgttcattcggctcaaaattaatggtactgctgtcgtttgtgcttcaatttcagtttgataactatgcaaaactgattgtaatggtgccgcttggtcatcttgtttcaagtcgtttaataatgccttaatcattgtaattgcttgatgcccacgttcctgtccatctgcataccatttcatattcaatcgtcccttactcttaatcaactgttgagacaatcataacgcttatctacatcattgacaaataactaaaaaggaactataactagtgtgaattattgttatttggaggggtttaaatgataagtcaatcaattgcaaaagaaaacatccatacactttacaacagtctaatggcgcatccggataaatcaaatgcattgttagatattaccgatgttttactacaggtctacctcaaaattgatacggttaagaatcccgaggcactcgtcaatcgcctggccaattacatctatagtgttggctttggcaagattcatctcaccaaggatgaagaacacctattgattgatttaggcgcgtttggccaacgtgctggttggaacggcgtttatcgcggtgattatactgccaaagccgattttttcagctatgccgatgaacataaatatgctagaaattaaaagagtgtgacggaagtctgggatttcccgagcacgcttagacgattagatttgaccatcagaaaagggattgagacaaacacaacgtttgtctcaatcccttttttaggcaagaatattgccaatcccatggttaataatcgtaaattcagtcggttgtaaatcagtttgttcagtgacgattggattcaactggtcaatcgtaaacggcgaagtaaacggaaagccgtcaccgtactgattaaaataagtcacagtattccccagcacgcttttcaattgctcagaatcgattgcccgcgtcactgtcaccaaatacgcacgattgttatcgcccgtcaaagtggtgctcgtaaaaaatttaaaatagtctttcgtactcatcactgatccccccaatctttaatcaacgttattataacgctttcaaagaagcaattacagtatctttcgtcaattccattataatccaccatcattgcaattcatcaccgttacgccagttaacttagatacccataccacatcacttagtgattatcatcaactcaatccgaagaattacatcccagccttgcaaactgaatcgggcgatttcatgactgaatgcgccgttattttggaatacattagtcaccaaagttcgctgccattaatggcgaactatgccactgaacagtactggcaacaacgcatgtggttgaattacatcgccaccgaattgcataagaacttcatctcaccatttcgtaaaggcaattggctccccaatacacccgaaagccaagatttagtccgttcacgggttttcccacggatcgcttatattgaaaaagcgttagcgggccagtccttcttagttgctaatcaattcagtgctcctgatgcttatctattcgtcatgaccaattggtgtcgacgactcgcattttcattgactgacttccctaatctggaccgttttgatcaacacatgcgacaagacccagccatgcaatccgtcctcaaacaagaaggcaaaccacattcatcgaaagcttaaccaccaaaaaaggaatcagcagtcgctgattcctttttttaatgatttacatcacattaatcgtgacgtcaatattgccacgagttgcctttgagtatgggcaaatttcgtctgcttttttgagatacttcattgtttcttcttctgataaaccttcgatgtgaccgaaaagatcaacaccaatataataattggcagggccatcactataaagggaaacggtcgccttaatcgtgggttcgcctttaatatgttcttggttaaggacaacatctaaggcactgttaaagcaagaactatagccggctgcaaagagttgctctggatttgtactcttccctgatgggtctgtccctggtgacttgattacatatttctttgcttgatcgggtgaataaacgaagccattgcggcccccttcattaatcatcgttgtttcatattgttttgccatttaaggtccctctttcttttattgaatacccttactttagcacagcaaaattcagaaccataatgatttgtttatacaaaaaaggcgccagccaaaaaatagattttggactggcgcctttcttgttaatccttaggctataactggctgattattcacacgctatttaatataagccgtcttgtagctccattgtgcgccagctgtgttatgcacaacgcctttgacctttggattcttcaagtatgccgtatcattttgatagagtggtgtaatcccttggactttattcatgacttgtgcagccgtcacgaggtccgcccaacgtttgtcaggatcgttcgcatcggcattcattgcgcggtcaagggcagctttgtattctggattgtcgaagccaccggtattacttgcagcccctggtaacatgatttctaagaacgaaattgggtctttgaaatctgccccccaacctgcgagtaataaatcatagtcgccttttttatcacgactcgctgaaacttggcttggcacggtctttaatgtcaacttgaagcctggtaagactttttcaagttgacctttgagatattgaccaacatatgatgcgttggcatcatcggaattaagcgttaaggtgagggcaactttcttttgaccagtcgctttcagtgcttcatgccaatgtttaagcgctaatttttgattgtaatccacggtatctggcacggcttgtgatttagcaaagtccaccttcttaggggaatcggctaagcccactggcacgaaaccagtaatatcgtttttcttcgaaccgaatagccggttattcaacgtcttacgattaatcgctaacgaaatcgccaatctaaagtcttggttattcaaaagtgcttttttctgttcatctactgatttgaagttgtatttaatgtagttcgtcaacgcataaggatatctgtggaatgctttatcatcccgataattatcaatttgttgattatccaactgggttaaatccagtttcttttcctgataaagataaagcgcggtgctggtattttctaacacggtatagttgacttggtctaattttacctttttgcgatcccaatattgattgttcttcacaaattgccacttctcaatcgtcccattccagttaactaacttaaacggaccagagtacaccatgtatttcgcgtttgtcgcatacttcttaccatatttttcaaccactttttgatcctgtggggcaaataatggataagccatcaaggttttcatgtaggccacaggtgtggataatgtgacttccaacgtgtgctcatccactgcccgtatgccgagttggtctggtgccatctcaccttttgcaatcgctggggcattttggatattactgaaaaggtttgtataaggtgatttggtttctggtttcaatgtccgttgccatgaatagacaaaatcttgcgcctgaatcgggtcaccattactgaacttggcatcacgcagtttaaatgtccacgtcttaccatcagctgaaactgaactcgatttcgctaagcctggttcaattttaccgttctcaccaagccggaataaactttcataaatgttccctgtttgaccatatcccgttgaagtcgagatatcaatggtatctagtggtgcttgcgcgccaagctgaagaacctgtttggcttgcacccccgaaacttggcataataagaacaccccgaatataaaaattgcactaacactaagttttaagaactgccgccctctttgcatgacacgcctccttacatttaataagtagagtataccaaatcatcagtcaaaagttaaataataagcctaaaaaaagaggcctttgtaaaattaacttttacaaaggcctacaatattaattagacggaattctcgactgacggcacattctaaacgtgcttttcaaaccatgttcctgcgtttagcctaattagccaaataagcggcttcgccgctttttcgtctaattttgctaatcctcagaacataaacggtttgaacgcactcttattcgaaacgtgctttcaaaagcatactgctgtgcttagctacacaagtcaaatgattgctttcagcaatcattcgccttgttaggctaatgctcgcagtatacccgcttttgacgcactctttagttcattatttcaaacaattgttttctgaattctggaccatacatgactgctccgactgggatggcgaagtctagtgcttcgttaattttagtcgtccaggttggtccgaagcccccacagagttcaataaattgaatgccttctgccttcaattgcttagcgacttcaataattgaaccatcttctttagcacgtggatcgaacccgacggtaatcatctcgcacgttcccattggattacggttaatcaccgtattttgttcaggtgaaaagtctggtgaaaaatagaaaaacgcccatttatgcaaatttgctaatgccattgtttcgtcctccttgtttgctttcatcatagagaacaatcatgatagaggcaattttactgcctcttacagccagccattatgccgtgcaatctgaattgcttcaacgcggttgcttgcatccaatttgcttaaaatcgtcgacatgtaattgcgaaccgttccatccgataaaaataatgattcggcggcttgtttcgtactcaacccattagcaatcgcacgcaatacttccgtttcccgctcagacagtggattcttcgtttgcgttgtcagcccaacaactaattctggcgcataaacaactttgcccttcatgaccgaatgaatcgccacaatcaagtcatcactcgggccatcttttaatagataccctgccacttcggtgctgatagcctgcttgaaataactcggttgggcaaaagtcgtcagaataatcaccttaatctgtggctgacgcgtatgtagttggcgcgcaatctcaagccctgtcatgcccggcatctcaatatctaacaaaacaacatctggttggagggtttcaatctgatcaagtgcgacttgtccattgacggcggttccgaccatcgtcaaatcatcctctaaatccagaatgcccgctaaagcggtattcaatagttgctggtcttctgccaaataaagtttaatcatgcccttccctccatcttaagtggcaccgtcatcgtcaactgtgtgccccggcgaccatcgaccatcaactctccatcaatcgtttctaaccgttcgcgcatgcccacaatcccatgactcttatattgatcttcgcttttcaatccgcgaccattatcttcaatctgcatctgaaaagtcgttgcggttcgattaaaaaccacgtaacactccgttgcctgactgtagcgaattatattggtcacggcttcatgtaaacattgcgcaagcacttgttgattttgttgtggaatcccttcaagttggtcttcatttttagtcagcagtaaaatgcctgcaacgctgagattccgttcttgattgatcaattcctcagcaacggtcacttggcgtaaaccagcgacaatctcacgcactatttttaaattctgacgggaggcttgttcaatctcgagtagttgttcgggtaccgcggccggttttttcgccaataatttacgtgcatattccgcttttagcgtaatcattgaaaatgactgacctaaattatcgtgtaaatcccgtgcaattcgttgccgttcgttctgcttaatcatatcggttaatcgctgattggtctgcgttaattggcgatttttccgattgaaacgctgaatcgagctagccgcaaatggtgaaaagatgcagaacaagccgtacaccattaagccaatcagattatcgcgtcccatatgaccaccataataccaatatagggtgaccgctggtatgattagtgacaacagataagcgtagtaatagcgccagaaacttcggcggcgcatgggaatcgaaccaaacacccaggcagtataaatattcagataaaacgcctggataatgactgctaaaatcgcactggtcaccatttgtaagataatccagaatgtgcgataccgcgatgcgacatacccattgcgataagccaccaagaaaatcagaatcaagcccataatcgcttgctgcttaaccgtttgatacggaaacgcataaccaattggaaagagcaagaaaatcaaccaaacatatggaaataagccatattggggtggcatggcaatgtagcgtttaaaaaaattcatgcatgcatcgctcctcttttatgatggtttaagtatacgacaattgccagtaataacccagcccagagcaacgtgatgccatattcacccaagtgtgcgggttgatgcgcaatcagcgcttggccaatatgattaatcggataaaccggcaaatgcttgccaatcacgcgagctgttttgggcattatttctgttggccaccataatccccctaaaattgctaaggggaaagctaacaaactagacaccagttgaatctgattttcatcttttaaaaatgaaatgctaatcccaattaaacaaagggggatgctggcaaaccacaaccagcccgccgttaataaccaactggaccacactaaatgaatttgattactaatcccagcaactatgaaaatgacgccgatcgttaaagcattgattaagcctaagttcaacaacttagccccataataagtccgatgactggttggtgataaatcgattaaggaaaccaagccatcccgtgcgtcattataaagtaatgtcgataaagtaaacgtgttgctgagaactaaactataggtcgccatactgaccatgtattgtcgattgaatgctgcattcatcacaccctgtttcattactttcgtaaacaagagataaaacgcaatcggcattaagagtgaaaaaataacaaagcgtggattacgccaatatgcgcgtttaaagtctatttttgtttgtaccatcattgtttgcattttttagtcctccatcatttcgctataaatttcatttaatgagcttgcttgaacctgcacatcatgaacctggatccccatcattggtgctaattgacttaagatcggatcgctcttggtaacttgcaacagcaccttggccccagtcttcgtcacgcggatcacgcctggccattttgcaaaagtagctgctggtaaatcagtcgtaaagcgaatctgcgttcctttaaattgttgttgtaatgttgccaagtcaccatcgaattggaactggccatctttcaataataaaatccgggttgcaatgtgttcaatttcctctaaataatgcgacgtgacaataatcgtcttgccggcttcttttaactgttcaatttgctgccagaatttttgtcggctgccaacatccattccaacggtcggttcatccaagaatagcaaatccggattgcctgccatggctaaagcaaaggagaggcggcgtaattgaccacctgaaagttgggacaccatcttatgagtctgtgccttcaaatcagctagcgttaataattcagcgactgaccgtggctgttgataataactgcaaaccaattctaattcttcgatgacactgacccgatccagtcggacatttccttgcatcatcgcacccaataagttgaaatgttctttctccgttggcttctgacctaaaatccgaatctcgccagccgttggttggagtcggcctaaaattaaattaatcaatgttgacttgccggcgccgtttgcacccactaagccaacaatctcaccaggttgaacacttaagtctacctgatttaaaacaacttgttgttcgaattgcattgtcactagtttaatttcaatcattgtcatcacctcatttaataaccctagtatagaagtgattccgttttgtcgttagacgattttgtcatgacttacagatgacaaatgtcatgtctttggtgttaaaataaagctgattcgttttaactcggaggttttaattatgacaacaagccaaccagcagcaccatcattttttacgaaccggtctacccaagccatcgcgcaagatttattaggaactcacttgctttataccagccaccaaggcacacttggcggcctcattgtggaagcagaagcctatgtcggcaccgatgacactgccgcgcatgcttacaattggcgccgcacaccctttagcgagccgctctatcatgagcctggtacaatttatatctatcaattacgcggtttctttctatttgatatcgtgacccaagcagtggatcaaccacaaggcgtcttgattcgcgccatcgaaccgacccacggcattgaacaaatgcgcctcaatcgcccgaaacctggcgtcgaactgactaacggccccggtaaattaatgggcgccctcggcattcacgataaacaactgacttttcaaaatgtggcggacgcccctttaatgattgatttagcgcatcgtcgccaccccaaatcaattgtcaccgcgccacgaatcggggtcaattataaagcagcgagtggtcaacttccttatcgctattatgtcgctggtaacccgtatgtgagtggtctgcctaagcgccagtgggacttagaacaacacggttggcaattttagcgccaatgtcaatttttaattgaaaacgatttcaacaatgctataataatcttgtgaattaaataattaagttagaagatcattgcatgaaaattaaagcagctgttgttgaacaacaaggcgcaccatttgtcattaaagataacatcgaactcgcaccactccacccagacgacgttcaagtccacatggtggctagtgggatttgtcactcagacgaagcgcttcgtaaaggcgacgccattattggctatccaatcgtcctcggccacgaaggttccggaattattgaaaaagtcggttcaaacgttcaaagtttaaaagttggcgaccatgtcgttctctcattctacgcatgtggcatctgtgaaaactgtctcaaaggcgttccaacacaatgcctcaactacgcagaaaataacttatccggcgtgcgccctgatggtagttcccactttactgaaaatgaccatcacattgccgatatgttcgatcaatcttcattcacaaccacaaccgttgtccgcgaacgaaatgcggttaaagtccctgacgatttagacttacgcaaactcggaccactcggttgtggatacgtgaccggtagtggcactgttttaaatactttaaaaccaaaacctggcgacacaatcgccgtcttcgggactggtgctgttggactcgcagccatgatggccggtaaaatttcgggctgtacgaaagtgatcgctgtcgatatcatcgacgaccggctcgcactcgctaaagaactcggtgcaaccgatacgattaacagtcgtcaaacagacgacgttgtcgcagcaatccaagccctcacaaatgggcgcggcgtgaacttctgtgtcgataccacggggattacaccagtcatggaagattcaattaaggcgctttgccaaggtggggtgtcagcaacaattgccgtaaccccaaaccacatcgatcttgatacttggaacgacttatgtgtcaacgacaaatccgtcgtcggcgtcaacatgggtgactccattccgcaaatcgacgtccctcgtttaatcgaattctaccgtcaaggcatgttcccctttgataaaaccgaaaaattttatcaattcgaagacatcaacactgccaacgaagcctctattaaaggtgaaacaatcaaacccgttttgattattgacccggactatcaattctaagcaatcaaaaagaccgcttattcagcggtcttttttaatttttctgacgccaataatggccaagtgttatcaacatcatcaagacgattattcctctgagtaaccaaagacccaatagcgcgccaaacacaatggtaactgcagacactaatggcttttggaaaataaacgcaaaccctaatataataatcaatactggcatgcagtccagctccttttctttttgaaaattgcatgttaaatttaaagcaatcatatgaagtgaggtgttagtagtgccagctattcccgataatctacttgccgcgaccatggggcgtaaactcgctacggttcgtcgtgcgcaaggcttgtcccaacatcaattagcccaggatatttgttcgcaaccgatgattagtcatattgaaaacggcacttatattccaaacgccattttgttagcaaaactctgcgaacggcttaatatgccgttagaacaagcgctgttaagtcattatcccgaaattgatcaacaacccgaattcaatcaacaaattaaacaactgtgcaatgcacacgattatcgcggtatgttagattatttggatacgactggcttggccgaacaccttgaactggcgaccgatttacagacctactactactatcatggcatcgcagtattccaagaacttcatacaaccacggatagtttacgggaactacaaatggcactcgactatacgtttacaccgcgccaacaagttttaacgcctactgagattttgattctcagtagtatcagctttattaagagtacaccccatactaatcaaactgacttcgaacacgtcctcgcaattgtgaatgcagggcggttcacgcactatgacgagaacattaatatcttattctacctgtatagtctggcactctatcaagatcaccactttcaaaaagcttttgccatcgccaatcaaggaattgactggctcagcaatcatgattcacactacatgttagccgacttattcttgctagtcgcctgtacaataaaaaaagagctacgacaaaaaattgacttttgtcgtagctcttttttgaaattctatatggctcattctactgcgctaataattgtccaattcttgatttaaattcagttaagaaacgcggcgtatcaacttgtacacaaaccgccgtccgcgttgctggatcatctaggcgggcattatccccaattgttcgtccacgtgacgggccttctatctcagtcttcaagttcaatggggaagtcgtgactaagctaggatcgattgcaacagcgactgctaagggatcatgtaaggcacagccgtgtaaatggggagaagtgacttcataggctttgatatagtaatcaaccatatcggcataagctttggctgctggtgtaccgagtgcgcgccattctgccgtatcggtgcgtgtaaaaagtgtgcgcaacgtgacatcaaggcccaccatcgtcaccggcaaaccactcttaaagagtaagtccgccgcttcagggtcttgactgatattagcttcagcaaatggagacacattaccacaaactgttaaggcgccacccataatcacgatttgaccaactttcttcaaagttagtaaatctttttgaatcgctaacgctaaattcgtcatcgggccagttgccacgatgctcaagtcagccccatacgcctgacaagcacgtaatataaaatcaacggctgattcagttgccatttccggatggggctctgtcagatgaatctcaccaacgccgtcttgaccatgaatttccgcactaattggtaagacgctaaaatcatgcgtcgtcgtcgaatgcccagcccctaaataaactggaatgtctggatgacctaataaatgtaaaatttgttgactattcacaacgcttcgttcagtcaaaacgttgccgtattctgaggtaatcccgattaaatcgacttctgatgatcccaatgcataagcaattgctaacgcatcatcaatcccagtatctaaatccaaaatcattttttgtgccacgccaagccctcctcaataatcatgcaaaataatgtacaccacaagtgtaccccattatcggggacgggtaaattaataatctaaggattaaactcaaaaaagacaagtagattattctactcgcccttttcgatgattcagtttagaccattgatttcatgatgcattaaaatcgtttgaccatctgactgagtcttattttggagccgatctaataacaacttagcaactgccaatccaatcgcttctgttggcggttgaatcgataggattggcaactgtccaaattgatgttcatcggcataatcatagtgaccaaatagtaaatcttggccaatccgaataccattttctgataaataagtgagcgcaccaaaggccatattatcattgctgacaaataaagctgtaataccttcggctaataatgcttgggcaccgcggtacccgctagtccgagaatagtcaccttcaaaaacatgtaactgtctgtctggataagctgccatcgtctgtttagcacctgccagtcgttcacgggcaacataatcatcctgattagcggcaatcatcccaatattctggtgtccgagatcaataatttgttgcatcacttgtgccacacttgcgcgatcatctaataaaatcgaatcaacattgcgtagctgatttgggttattaatcgtcacaaccggaatatcaagtgccgctagtcgttccattccttgccattcttcacctgctaagaaaacaattaaaccatcaatcgaatgcgccattaaataatcaattttttgatcaattaacgctggttggtcactaaaaccactcaataataaactatacccttgttgctcaacgcgttgttctattccagaaacaacttccgcgccaaatcgacttgaaatactattcatcaataaaccaattgaaaaactttgattgttcttcaatcctttagcgataatattttgtttgtaatcgagttgctcaatggccgctgcaatcttggcttgattagctgctttaagctgttgcccattcagataccgtgaaacagttccgaccgagactccggccaattcagcgacttctctaacagatgacattcttattccccgcttatatcgataaagtgattttctccgctaaatcagcaaccataatagtcgctgcttgcgcacgtttcacctgattatcaatatccatgtaattaaaatcagcagcaggtagttcgaaagtaatgctcttttcttcacctggttggaaggcattcttttggaaagcttttaacagcttcattcgttgaataactgctccaccagttaatttgacaaataataaactactttcttgacctacaaactgtccgttattttttactttaacagttacaactagtttgtcaaccatttgcttaaccgctaattgtcgataatcaaattggtcgtaactaagtccgtaaccaaatggatataacggttggccaacctcatcatagtaatcatcttgtttagcagcatcgcgttgatagtagtaaaccggtagttgctgggtattgcgcgggtaagacacactcaacttaccacttggattattaagtcccactaaagtttcagcaattacgcgaccaccttgttgaccaggaaaccaagcaatcaatacagcatctgcaagttcatttaccagtgttaaatcgtatggccggccttgcaccatgacacatgcaattggcttgcctagtgctttcaattgcttgagcagcacttcttgttggcccacagactaagtgatgcgacatcaacattttcaccagaatccatgttgatgccttttgaactcactgccccgttacttaggaaggccatatcaaaattacgtgcactggaaccacctaatacagggatgattaaatcggcatcgcgcgcaagctcaactactttggcaattgcctcttcttgatgaattgaattacgcacctcacagcctaatgcatacacgacttccgactcgggaaacatttcttgaatcgcttgataaattgtttgcgcttgacgcgctgaactttgtgctgctgtataatcccccaagagattatataattcatcagcattggggccaatcaccgcaatcttttgcggctgattccggattggtaaaagcccattgttcttaacaagcgtcatgctttcacgtgccacttgcagattcagcgcatcagctttttcaagcaaggccgtcaattgcgcattcggggcttgtacatagggttgttcaaacagacccaacaggaatttcaacgctagtactcggccagcagcattatctaaggcagcttcgtctactaggccattttcaatggcttgatcaagcgttaggaatgtctgatcccataaacttagatcgacacctgcatttaaggctgccgccgcagcttctggttgtgtttcaaagattcctgataaccgatcaagcgcaacaccatctgccatcacaatcccttgaaacccatttacatcccgtaaatcttgagtcaacaacggctgattgatatgacacggtaccccatccacatcgttataagcagccatcacacctgccgcattcttgacactactcaaaaggggttcatagacgtctgaaaattcacgttggccaattgtgacggtgcctgaattatggccacccaatgcttcaccttgcgcaatacagtgtttcaatacaacaccaatggcatcagtcgttcgcggtttagcaggttggtctaagaaagcaacatcactttgaattaaatccccttgaaaacccgccacaacggcttcactcattcgcgccgctaaaatgggatcttcaccaaaacattcttctgaacggccccaacgtggatctttgaccaaatcaagcgtcgaaacaagcgctaggttaacgcctttaagcgctagttcttgtgccatcagatgcgatgattgctgcattaaccgcgtattaaacatattgccgcggccaatattcgttggatacgagattccttcaagcccttgatggccatgaggacattcttcaacaattaatgctggaatcccccagcgtgaatgcgccatgacatattcttgaactttattagcaactcgccaactatcctgtgcacgaacgccattttcaaagttcacttttgaccatggatctgcgcgaaataaaccataaagtgcaccgacaccgccgccccattcaacatgcgccttgaatttttctgtaaacgttaatgactgagaatcttcgaaagtttcccatccataaagatgttgattcacttgaccaattttttcctgcgtactcatgcgtgaaagtaaataagtgacccgctcacgaatggtcagcgctgcgtcttgatatggatactgcatttcaaaaacctcattcctcagttaatactttgttacttgcaatgacaaatggtaagaataaaaagacatctaaaccaattaataagatggttaaaatcgctgctcggtaatcaccgccagttgccaagaaagattgaataacaggcggtgtaatccatggtgcagccgctaccgttttactaatcaaacctaagcttgttgcaaaataagcaatcactaaattgattgatggaatgatggcacatggaatcatgaaaattgggttcataacaactggtaacccgaacataacaggttctgtaatattgaagaaacaagttgttaaccctaatttagcaacttgccgttgatctttccgccgtgaagcccataaaatagcaatcactaacggtaaaatacagccgcccccaccaatcaagccgaacgcatttgtaaaaggttctgtaataatatttggaatcgcatgtcctgctgaaaaagccgccatattttcttgaatggcttgtagcaatggtgcttggcgaactggtgctaaaatgctagaaccatgcatcccaaagactcataagaaatctgagaagaattgtaagaataacgtacctggtacagataatacaaacgattttagtggcgtttgaatcgcaaggtcgattaattgagggacgttcaacccggttgtcacatttaaaataaatacaaaaatagcaaaaatcaaaacaaccaagacttctgggaccaatgaattaaacgaggttgcaactgctggtggcacgccttctggcatcttgattcgtattttttcaaactttgtaaaacgaatgaataactccgtactaatcaatgctgctaacatcgctgttgcaagtcctgatgacgaggttaaactttgcaagaaaacgcctgttgcttccgccgttttcccatttgctaaagtgacggtactcgtcacaggcatcaaaataaacattgttgccaaacttaaaataccagcatgaactgcactaaatgcaggatcgttcactttcccagagcgaacataatgcgttgctaaattagcaccgatgttataacagaccacaattgataaaatactcatcgtcccattattcacaattgttgctaggtcagctaatccacttaaatcaacaatcttttgaacagcggcgtttgagaaaattagcgcatttaataaaaccataagcgaggccgccataacaagtggcattgtcacaatgaagctatcccgaattgcaattagatgccgctaattattgagtttagaaacaaacggcaacatcttttctgacagtttatctacgaatttcacagtcatttctccctttattgaatagaattgaaccggttcaatttcgtataatagcacgcgattatcattttgacaatagcgcttacaaatataacctaaaaaagattgagtcctcctcatgaacaactcaatctttaaaccattgacaaaggccacctattcctaggtggccttctaattaatttcgcatattaaattcttacataatgtcaggtagccagtcactaattggctacgcacactagcatcgaatggctagtggagatgacgtgtgattcacgtcgcttttatttttgggttaattcaattatgtctaaattcttgtgtttctaaatatcttctcgtttaaacagcgtaagccgcctctttacactacttgtaactccatggttactccagttgattaaagtcttcaaataatacttgatactacagtgataagtgctgattaactttcctaagtataccatattttcagttcgaacacaaaatgaccataatctttctgaaaagaggctttccatttgaccaaaattgacctttgctgtaaaattcaatttatagactacagagtgattctactctggcttatataaggaggcaattcaatgttagtaccgacagttatcgaacaaacatctcgtggcgaacgtgcttacgatatttactctcgtttactaaaagaccggattatcatgttatctggtgaagtgaacgaccaaatggctaacacaatcattgcgcaattattattcttggacgcgcaagattcagataaggacatctcaatctacattaactcacctggtggttctgtgaccgcagggttagccatcatggatacgatgaacttcatcaagtctgatgtccaaacaatcgcaatggggatggctgcttctatggccagtgttttactctcagctgggacaaaaggcaaacgttttgcattgcctaactcaactgtcttgattcaccaacctttaggtggtgcacaaggccaacaaactgaaattgaaatcgcagcacgcgaaattttgaagactcggaaacgtttaaaccaaattttggcagacaactcaggccaaaccttcgaaaaattacaagctgacactgatcgtgataactacatgacagcccaagaagcaaaagactacggcttgattgacgatattatggtcaaccaaccaaaatagagtagataataaaccggttctcttctggggattagtaaaaaaaaggctagatcaagttgatctagccctttttttataccaaatttgttatactggcagtatcttaaaggagggtcttccatggatattagtgtgattaaaagcgagaatgtgacaaccaccggcggtattacaattggtcagccagatgcaccattaacatcaattgaatttatcaacgccgcttgtccttattgccgcaagtggtttttaaaatccgaagaaacgatgactgaagcagtcaaagctggtcggctaaaacgtattatcaaaccttttgataaggataaagaggatctacaactggggaatttagcccatacctatttaccttttgatcaacccgaaatagtgctgcaaacactatcattcttgtttacgcatcaaaaaacatggcgtaatgatctgacaccagatgaatttaaaaaatacatcgatcaaaatctcaaattaacgccacaagataatgcagaaaatttagccgcaattattgctgaagccgatcgtgccaatattaaattcgtcccgaccatcattattggtgaccatatctttgatgaatcaattgatatgactgacttaagtcaactactaaaataaaaaacaggtgcccccccctcggggcacctgtttttgtatgtacgataaagggttccaaaaaattcaatttaccatcaaatcttttggaaccctttatccgtcattttatgaaaaacgtgcattatccatttgaatcgcattcaaatgatgttcaacttcattcatttcttgacgtaattcatgatacttatcgcttgagaaatcgagatagtttgtgcaagcaccaacccgttcgtagatttcttctttttgactttctgctttttcagttaaggtaacgtcaactcggcgttcatcgtctaatgcacgattccggcttacccaaccatcagcttctaagcgtttcaaaagcggtgttagtgtcccactatcaagttctaaatggtgccctaattctttcactgacatcttgccatgttcccacaatgcaagcattgcgatgaattgtggatatgttaatccgtaaggttttaataccttaccgtagaaatgattgtaagccttttgtgcgcggtaaatcgaaaaacagagttgttcatctaataatactggtttaaccatataattttcctccataaaatgtccttcagttattgtacttaattatattgtacaagtcaaatattgtacactaccgatttattttgccccttatccattcccctgttggtgggcttcggcaagttgattcaattttctgagccgatgattaatccccgacttcgaaattgccccactcggcattttttccccaagttccttcaacgtaatatctggaaattccaaacggagtagcgcaatctcacgcaacttcgccggtaaattatctaatccgacggtgtcgcgcaagtattcgatattttcgatttgttttgtagcagcatcaattgtcttattcatatttgcggtttcacaattgactaagcgattaaccgaattacgcatatcccgcacaatccgaatgtcctcaaacttcaacatcgcgttggtagcaccaatcacttgtagaaaatcagcaattttttcagcctctttcagataagtgatgtacccactccgtcggaaagtcgttttggcatttaagccaaaacgattcatcatgcgcgcaatatcttgattatgctcttcgtataatgaatagatctccagatggtaccggcttgtttcaggattattcactgagccaccggctagaaaagcgccccgcaaataagaacggacgcgctgatcttcattaatgacatcttctgacacctttgtatgaatggtaaaaccgtcctcctcaacaatatcaaggtcttttaaaacggtattggtatcatactttaagcgcacgatgtattgattattcttttttaacttcattttgcgacgtactagtaattcggattcaacttgataattttgtttcaataaactataaatccggcgagcaatcgccggattctcagtttgaacgtttaaaacaaattggtgattcatcaagctcagtgacccattcatccgaattaaagcggctaattccgctcgtgcatgttcaggatgcacttcaagttgcgtcagttctttcttcacttcacttgcatatgaggccacgattattcacctcgcttagctgtattgacctggaaagcaagattcataatttcactcgctactttttgtccattatggaacacaccatgatctttcaacttcaaaaagttatcggaaatcactcgacaacccaatcctcgtaagccatcaaagtcatgttcaaccggccagagaatttcgtcgtacttttgatgatccaaatagttttcagggacttgtgcggtattaaccaaaaccgtgtccacgaagttctgaccaagatgatcattcaacacgcggacgtgatcggcatcggtaaagtgttccgtttcccctttttgcgtcatgatattacaaatgtaaatcacttccgccttagtttgcttgactgccgcacctaagtttttaatcattagattcggtaaaatactggtaaacaaactgccgggtcctaagacaaccacatcggcagccaaaatcgcatcaaccacttgttgaacggcttcgggtgctgcagtatcatcttgatccgtttttgagacccaaacacgcttaatctgcttgcgtgctgcagtaatctcagattcccctgttaactgggtgccgtctttaaattcagcattcaacgacagcgcaacattggccgcaggataaatatgaccgtcaaccgccatcatttctgataaccgttgaacagcatcaaaaatacctgattccatttcagataacgccgcaataattaaattaccaatcgcatgccctgagaaaaaggcatcgtgtgatttaaagcggtattgaaaaatatcgagcgttaactgtggtaaatctgacaaggcgactaatacattccgaatatcaccaggtggtaccacgttaatgtaatcgcgaataacgccggatgaaccgccatcatcggcaaccgtgacaattgccgtagcatccgcattctgttcacggagactctttaagataacgggtagtccagtgccgccaccaatcacaacgacttttggtcgtcgccctttaatgacccggataatccgattagtagctgtcatgaccggttaaccgtttccttgcgtttcttcatatcccggtgggtcacgtcaaccggataatcgaacgataaatcatcagccaatcgttgggcaagcgctactgaacggtgttgcccgccggtacagccaatcgcaattgtcacacttgttttgccttccttgagataacctggcatgatgtcttttaacagcccactaaattgttcgtagaacttttcagtcgctggctgcgccattacatagtctctaaccggttggtctaaaccgtttaattccttaaatgctggcacatagtatgggttcggtaagaaacggacatccatgacgatatccgcatcaattggtaaaccgtatttaaacccaaatgacatcacttcaatatggaatgacggattatctgacgtcttgaagacatgaaaaatcttttctcttaattgtcgtggtgacatggttgaagtatccaccaccatctgtgctcgattgcgaatttcagttaacaggcgccgttctttttgaataccgtccattaaacgcccctccatcgctagtgggtgggaacggcgtgtttccttgtatcgcgaaaccaattcctcatctgatgcatccaagaagagaatcttagtcgtcacgaattgggtattatcaaggttagcaagcatttcaatgatctcatcgtaaaaagcacgtgagcgcaaatcaatcactaatgcaatcttagtcactttgccggactccttaaccaattcccaaaacttaggtagcaatgtcggtggcatattgtcgacacaaaaataacctagatcttcaaaactttgcatggcaacggttttcccggcaccactcatccctgtaatcactactaagttcaatgtatctgtcatcagaccaccccttaagttttcgcttttatcattgtaacattcctggtgtgtcattgaaagctgtcgaaactctcgacacgtgttatttaatgctattaaaccgagttcattcctaatgtctaggcatttgaaagagcttattttttccataaaaaaaattgcagaacaatcaaattgttccgcaatcattaaatttagagactataaacgtcttgcaaatgcgatgatgatggcattaatcccaaagaaagcaaagtaaaaaccaactagggtcaccatcgttacggcagtcaccactggatccattaacaataagatcccaacgattacgcctaagatattcagaatcatcgaaacgatgtataggcctgtgttaaattgcttgagatggccgacattcaataatgccacaattgaatcgaacaagaaccagaatgcaaagatataacctaaagcagccactccagctggaatattcaagataaacaaaattcccaaaatgacatcgacaatggcatcgaccaacattaacgttgcgcgcatccctgtctcttgacgtaaccgactatatgcactgattttggcaattccccgaataatcgccgcaatcgcaatcacgattaccaaaccagataatgtcttacctggttgattaaacaagcaatatgcaacgattaagaaaataatccccgtcataaattctgaccaatcaaagtgccattcattttttctaaacattcccaatcacctctcgttgttaatacctttatgatactttttttacggacaatctacaactaaatttgacaaaacaaaaagtgggcggttaaaacagcaatcattctgtcttaaccgcccgctttttaaacacattctatcaaccatcttctggttaatcctgagcggcaattgtgcgtgctgtatcgcgttctaaaacaggttttaaatattggcctgtatagctttcactgacgttggcaatttcttctggcgtaccggtcgcgacaattgtcccgcctttatcgccgccttctggtcctaagtcaatgatgtgatcggcagtcttaataacatctaagttatgttcaatcactaagatcgtgttaccttcttcaactaaccgttccaaaacgcccaacaagcgcttgatatcgtcggtatgcaagccagtcgttggttcatcgaggatgtataaattcttacccgttgattgtttctgtaattcagaggccaacttcatccgttgggcttctccacccgataaggttgtggcagactggcccaatgtgacgtagcctaagccgacatccacaatcgtttgtaacttgcgggcaatcttgggaatgtttgcgaagaagactgtggcttcaccgaccgtcatgtctaagatttcggcaatgttcttgcccttatagacgacttccaaggtttctgaattatagcgactgccatgacagacttcacacggcacatacacgtctggtaagaaattcatttcaatcttgataatgccgtcacccttgcaggcttcacagcggccacctttaacgttaaaactaaaacggccttttttataaccgcgtagtttggcttcattggtttgcgcaaacaaatcacgaatattgtcaaagacgccggtgtacgttgctggattactccgcggtgtccgaccaattggactttgatcaatattaatcagtttttcaagattctgataacctgtaattgttttatattgacctggttttgctgagttacggttcatcttttgtgccaaagcttttttcaaaatcgtattgactaaggttgacttgcctgaacctgaaacaccagtaaccgcgacaaattcacctaatgggaaatcaaccgtcagattcttcaagttattttcagccgcaccggtcacgcgaatcttcttgccattgccttgacgccgttctagcggtactggaatatattcggaaccggctaaataacggcccgtcaatgatttcggattatgttcgacttcagttggggtcccagcggccatcacttcaccaccgagttcaccagcgccgggcccgatatcgatcaggtaatcagccgcgcgcattgtatcttcatcatgttcaacaacaattaatgtattgcctaagtcgcgcatcttcttcagtgacccgatcaaacggtcattatcacgttgatgcaaaccaattgacggttcatcgaggatgtagagcacgccagataagttcgaaccaatttgcgtggctaaacgaatccgttgggcttccccaccagaaagggtcccggctgaccgactgagcgttaaataatccagaccgacgttaatcaagaaagttaaccgatcatgcacttctttcaagattggtttggcaaccacactgtctttttcagaaagttcaagttgatcgaagaatggtaaagcttctttgatggcgttgtctgaaacggcaacgatatcttggccgcccactttaacagccaaagcttgtcgatttaaacgagcaccatgacaggtttgacacgttaattcagtcatatacgtccgcatttgcgtccgtgtgaaatcactattggtttcacgataacggcggtcaatattggctaatacaccttcaaacggcacgtccacatcacgcacaccaccgaaatcattttcataatggaagtggaagttcttaccctgagaaccatttaagataatgtctttttggcgtggtgttaatttgctaaatggtcgatccatgtcaattttaaatgacttgcaagcttgttcgagcatctgtggataatattgagagctaattggattccaaggcgcaatggctccttcgcgcaatgtcttgctggtatcaggaatcactaaatccatatcgacttctagcttaacccctaaaccatcacagtctgggcaggccccaaacggtgcgttgaacgagaacaagcggggttctaacgcgcccaccgtaaagccacagattgggcaggcatagtgttctgagaaaagtagttgttcgccaccgatgatatcggcagtcgcatacccttctgataagcgcagagccgcttcgaacgagtcaaataaacgggaccggacaccgtctttgacgacgattcgatccaccacgatattaatgtcgtgttttttattcttatccaattcgatatcggcactaacgtccatgacttcactatcgacttgaacacggacatagccttctcgttggattttttcaaatacttttttatgttgcccttttttgccacgaataatcggtgacatcacctggagtttcgtcttctcaggtaacgctaagacacgatcaaccatctgttcaacggattgactactaatttcagtcccatcgttcggacagattggatgaccgacccgcgcccataaaagccggagataatcattaatttccgtgactgtcccgactgtcgaacgcggatttttagacgttgttttttggtcgatcgaaatcgcaggactgagcccatcaattgaatcaacatctggtttatccatctggcctaagaattggcgcgcataagccgataaactctcgacgtagcgccgttgtccttcggcatataatgtatcaaacgctaacgaactcttcccagagcccgacaatcccgtcacaaccaccagtttatcccgtggaattgtaacatcaatatcttttaaattatgcgctcttgcgccatgaatgacgatcttatcatttgccatgctttacctcttttaatcaatttcactcttaatctctaagatggtatcccgtaacgtagctgcctgttcgaagtccagtttcttggccgcattccgcatttgttcagataaccgttctaccatttctagtttttcagctttcgacatactatcgaaatcaatctcgttggtcatcttgacttcttcagggtgttcgactgattgaacaaccgaaatcgcatcccgaactggtttgataatcgtcttcggcgtcatgtgatgtgcttcgttgtaggcttcttgaatcgaacgccgccgcttggtttcatccattgcattgcgcatcgaatcggtaatcttatcggcatacaaaaggacttgcccgttttgattccgagaagcacggccgattgtttgaatcaatgagcgctcgctccgcaagaaaccttctttatcggcatccaaaatcgccactaacgagacttcagggacgtcaatcccttcccgcaacaagttaatcccaattaagacgtcaaacttaccaagccgtaaatcacggataatttccgttcgttccaaagtcttgatatcactatgcaagtaacggactttaatccccagttctttgagatagtcagttaaatcttccgccatcttcttggttaacgttgtaataaagacgcgttcgttcttttcaatccgatcattaatttcgccgaccaaatcatcaatctggcccataatcggccggacctcaatattcggatctaacaagccagttggtcgaataatctgatcgacctgaatatcggtttgttcagcttcataagggcctggagtcgcagaaacgtacatgatttcattgacgtgttcttcgaattcaggtagcgtcaaaggccgattatcaagcgcacttggtaatcggaacccataatcgattaacatttgcttccgggcacgatccccgttatacatcccgcgaatttgcggcatcgttacatgggattcatcaatcatcatgattgaatctttcgggaagaaatcgagcaacgtataaggtggttcccccgccgcacgatcctccatgtgccgtgaatagttttcgatccccgagcaatagcccatttcttgcatcatctcaagatcgtaattcgttcgttgttccaaacgttgggcttccaacaacttgccgtccgccttcaattccgttagtcggccttctaattcagccttgatactcttaatggctttttccatcttttcttcactagtcatgaaatgcgttgctgggaaaatcgcaacatgttcgcgttcaccaatgacttcaccggttagcgcgtcaacttcaacgattcgatcaatctcatcgccgaagaattcaacccgcaacgcatgatcatcacgtgaagccgggaaaatctcgaccacgtcaccacggacgcggaaacggccccgttggaaatcaatgtcgttccgttcaaattgaatatccaccaattgacgcaataagtcattgcgctcaatctccatccctggccgtaacgaaaggacgtgatcttgatattcattcggatcacctaagccgaaaatacatgaaaccgacgcaaccacaatcacatcgttgcgttccaacagcgcactggttgctgaatgccgtagtttgtcgatttcgtcgttaatactcgaatctttttcgatgtaggtatcacttgaaggcacataagcttctggttggtaataatcgtagtaactgacaaaatattctaccgcgttattcgggaaaaattgcttaaactcggcatagagctggcctgccaaagtcttattatgcgaaatgatcaatgttggtttgtttaaattcttgatgacgttcgacatcgtaaaggtcttcccggtcccagtcgcccccatcaagacttgtgcttttgcacccgcctcgaagttcttagttaacgtttcaattgccgctggttggtccccagctggttcatagggcgccactaaatcaaattggttatcattctgtcgttcaatcatcaaaagcctccattaccatttgctagcgataaaagaagacgccgggtagaagttgccctccaccataacgtctacttaccgattttataaagaataatattccttgtcctttaagtcattcactattctaccacaccgaacatactttcgccagagtgctgattaaagagtgcgtcattaagcggttatcctttgaggattagcctaaccagacggattagcgacgcagtcgatgatgcggctggtgtagctaaccggaaaaggatgcttaatgaaagcacgtttcaactaaagtgtggaaacgtgctgttgtcagtagattcctgcgctttgctacacttgtcaaatcgccgcttatagcgtcaattcgccaagttaggcaaatgctctgaatctgagcgactgacaacggcactctattccgctagcgtctgtctcactaattgggttagcttccctcgatctgcgaagtcttcactcagtaaatctggcaagatttcttggatgaaataacgggcgcatgcgagattttggtattgcataatcgtttttaaactttccgcaaaaatttctagaaaagcattctcaggattacctttttcaatttcaccaaaagactcgtagagtaaatcaatcttatcggcaacggctaataattgcccttccaaagtttcatcttttccttcactcaaacgacgttgataccgttcttgtaagaaatctggaatttcatttttaatgaagttagcggttaatgaactttcgacattggccaacatcgtccgcaattcatgcgttgcgtatttgaccggcgttttaatatcaccgataaaccgttccgtataatcgtggttcagtgcgcgttcgtacagcacttgccaattaatcgtttgcccattttcttcttcaatatcgcctaataattgcgcaatttctgctactttaaaggagtgcgctgcaacggaatgttcttgatatttaaacaatcctggtgcgcgatttagtgtctccaaattattcaaaccttgcaaatattgatgcatacccataccaaactacctcccttttcttacaaaaatagaccgactaacgcagtagtccgtctatttgctgttctttattataggtaagttatcctgaaatgtaaaacagaagccctatctattttacaagttcatgaattgctttttcgaagtttgctaacttcaaatcagctgttgcggcatcatcagcggatgtccccacatagaatttcacttttggttcagtcccacttgggcgaatcgcaatccaagtgccatcttctaagtgatatttcagaacattagatgttggtaaattgatgggttcagtatgaccgtccgcaaaagtttctgtttgtgtttggaagtcttctgctgaagcgactttgatgccggcaaattcaactgggctttcttcacgacatttaaccatcaagtcagccatttgttgtgggccattgaccccttcgaaatcaactgcagtcgtttgttcagcgaagtagccgtattccgcatataattcttgaatgccatcatacaaagtcttaccgtttgacttgtaataagctgcaacttccgctaataagaccaatgtttgaatcgcatctttatcgcgaacgaatggtttcactaagtagccatagctttcttcgaaaccaaacatgaaggtgttttcgtctgtgtcttcaaagtgttgaatttgttcagcgataaatttgaagccggttaagacatcaatcatcttcacattgtagctcgctgcaatcttcgttgccaattctgttgacacgattgacttaacagccgctgcattggctggtaatgtgccagcatctttactagcttgtaaaatataacgtaataaaacagaagcgatttggttcccagtcatcaattggtaactcccgtctggttgacgcacagcggcgcccaaacggtcagcatctggatcagtcgcaatcaacaagtcagcttgttgtgctttcccgagctcaatcgccatatcgaatgtttgtgggaattctggattagggaatggtgtcgttgcaaattctggatcagcaactgcttgttcagcgaccattgtaaattgttcaaagcctgcttgacgcaatgcgcgttcaccaagtactttcccggtcccatgaagtggggtgtaaatcaatgacatggtcttgccgactgtgtcgaccaattcttgattaatcgtgacttgcttaacttcagctaagtaagcttgatccacattttcgccaatcaaagtcattaagccggcttcgcgcaatgtgctttcatcagccacttcaatcgcaaataaatcggttactttgcgaatataacttgtgattaaatcggattccttaggtggcatttgcgcgccgtcttcgccataaatcttgtaaccattgtattgtttaggattatgacttgctgtaatcatgataccggcataggtatgtaagtgccgtacggtaaatgataattcaggtgttgggcgtaaggcatcaaaaacaaacgttgggatttgatgttgacctaagacccgcgctgcttcgtgcgcaaatgtttcagattgataacgtgaatcaaaactgatagccacaccgcgttttttagtcgcttctggtaatgtttccatgaattgagcgaggccttctgtggcttgacgcaccgtataaatattcatgcagttgatcccagggcctaaaataccacgcatcccagctgtcccaaattccattggaacgctaaatgctttttctaatgcatcatggtcgtttgccatttcgttaagtgctttttttaaaggtaaatccatttctgtttgattattccaaattgcataattatcttgccagctcattgtgtaacccccgcattttagtctaaaagctagttctaagtataccataatcaaccgctttcctaaagcatcggttgtacggtaatgcgcaccaagctaattgtctgggtcgattatttaataatgcttgtccttctaaaaattaaaatttttcccaaaataaaaaaacggccgactaaaatttagtcgaccgctggaaatgtgcgtcataagccacatttttaggttaatcctcaaaaataaaatcgtttcgaacgcactctaatcgtgcttcctcgaactgtcttttctggttaaccctgaatgtcaaacgattgctaccgcaatccttcgccattctgtgttaatcctcggaagctaaccggctgccgtcgcactctagatactttgtaagtatttaaatacttcttggcctgctatgccgccgtcgccaactgctgttgtaatttgacgaagatctttttcacgaacgtcaccaattgcgtagatacctggaacactggttgccatgtggtcatccgttttaatccaaccggcatccgttagaatccctagatcaccaaaggcactagtcattggttcaatccctacatagatgaagaccccacttgcagcaacttctttggtttcaccagttaccttatcaatgtaagtgacaccggttaccttcttgtcgtcaccttcaatagttgtcacttgtgcattccagatgaagtccatcttgtcgttagcaaatgcacgatcttgtaaaatcttttgagcgcgtagttcatcacgacgatgaatgactgtcaccttgctggctaattgcgtcaagtagaggccttcttcaatcgctgaatcgcccccaccaatgaccacgacttctttattcttaaagaaggcaccatcacagaccgcacagtatgagacaccacgaccgccgaattcatcttcaccggggatcccaatcttcttgtgttctgaacccgttgcaatgatgattgaacgcgcttcgaaatcgccttcgtcagtgtgcacaatcttcatctcgccttgcagttcaatcgagttgaccgtaccatagccgtattcagcaccaaattgagtggcgctggcatacatcttttcgcctagttcaggaccaaggattgatttaaagccgggataattttcgacctctgctgtattattcatttggcccccgtaaattccgcggtccaacatcaatacagataaattcgcacgtgaggcgtataaagcagcggtcatcccaccaggtcctgcgccaatcacaattacatcataacttttagccatgtctattatccccttacttttaaaaagtgctcgttcttcatagaatgtatcttacccgttatgtaaaaaaaagtctaccaaactgttttaccagtttgatggacttgttggtttcaattcttgtaataattcagtggcttcggcatcgaaatccgaatcgtcactctgtaaataagcagtcgctaattcatagctagcctgcgtctgatttaaaaaggcatacgccgttgctaaaaaatattgtaactcaggatgactctgatagttggcggttggaatttcttccagaacggtcgccgcaccatgatagtcgccaaccgattccaaacaaatcgctaattggcacaccacaaagatgtaatcatctttggtcttagccagcgactttgcccgttgtaaacacgttaatgcgcgcgtgtactgaaatcgttcaaacgcctgcatccctctgtcaaaataaaactcacaagttggtcttacagataccaaatcgcccataaagtaatcggttctcctttagcctttttctcaacgctaatcatcataacacactctgatgatgggtgcgatacccattcaaaatgatgccgctttattcgttaaaaagttttagacttcatcaaaatcgatttcaggtttacctgaacgccgcattaaatacgcaatttcagtcttaatatcacaatcttcatacaatacattatagatggcccgtgtgattggcatatcaacagaacgttgttgagccaattcataggctgctttacatgttgcgaccccttcgacgaccatccccatattggctagcacatcagctaatttttgacctttaccaagtgcatttcccgcacgccagtttctcgagtgaacactggtcccagtcacgattaaatccccaacaccggataatccgataaaggttaatgggttagcccccatggcaacgcctaagcgggaaatttcagctaagccacgcgtcatcaaggcggccttcgtattatctccataaccaagcccgtttaaagcgcccgcgccaagtgcaatgacgtttttcaaagcagctcccatctcaacaccaaccacatcagggttggtatataagcggaaataatcattcatgaaaatctcttggatccattgggcttgaatcaagtcacttgatgcggcagttaaggtagtaatatctttttgtgcgacatcttcagcatgactaggacccgataaaacaacaatcccattgcggttggtttctggaatggcttctgtcaagacttctgaaatccgtttgtgcgtgccttgttcaagcccttttgaagccgtcacaatcacgggtttcacttttttcgcaatcatcacaggaacaatctgttccgccaccgcacgaatcgcttgtgttggaattacaaacaagacaacgtcaacttggtcaagtgcaacgttaagatcaatcgttgcgtgtaactggggatcaattttaaaatctggtaaataatgtgtattggtatgctgttcatttatttcagcgacttttttaggatcattgccccacaactcaacttggtggccattttccactaataagtttgctaagatggtcccccatgaaccggcccctaaaactgcaatttttactgtcatctgataattctccttttaaacaaatccctatttctgttcttttgcttgattgccggttaaataatccggtaactgactgtgcttacgccgccaaatccaaagaccaattgcaccaaagaataagacgagtgagacaatctgcgatacccgcaatggaccgatgaataaactatcagtccgcatgccttcaatgaagaaccggccaaacgaataccaaattaaatagctaaataagatttcgccttgtttaaaccaaccagttcgatggcgaatgctcatgatgataataaaccctaatacattccatgctgattcatataagaatgtcggctgacgatacgcaccatcaattaacatctgttggatcacccaatcaggtaagtgtaacgattggagaaagtgcaatgttgttggcgccccataggcttcttggttcataaagttgccccaacgtccaattgcttgtgcgatcatcacggttggtgccgcaatatccaacactaaccaaggcgatagtgcatgacgccgacaatagataatgaacacaatggcagctgcaatcagtccaccgtaaatcgcgatcccgccgtgccaaatctgaataatttcgccgggattggcttggtaatacgaccattcaaaaacgacgtaatacagtcgggccccaattaaggcaaatggtaatgcccataaaattaaatttaaaatatcatcttcactgacattgcgccgtttagcttcctgtaatgccaatccaacggctaaaacgaccccagttgcgataatcacaccataccagtggatctccaatgcgcccaatcgtaatgcaatcggatttaatgcgcctaatagtagattcaaattattcgctccttttgtaaatgtgctttcatcaaaacgtacttttcaagctaaatttctgcgcttagcgtcgtgaagcaaacaatcgactgcgtcgcttatcgcttcactgtgctaatgcgcaaaagttggacaagcttgaatgcactcttatccaaaacgtgttccgtaagccatatccttccggttccccctgaatgtcaaacgattgctgacgcaatccttcgccattctgtgttaatcctcaggatatacccggcttactgcgcactctaaaaaaagactagtttgcatactgtctttctaacagtatagctcaaactagtcattagacctaccatatttaacgaacttttctgacttttaactattcttcttcatctgaattggcttcaattaacttgcctagattggcttcgaaggtcttcgttgcatcatagcccattgattttgcccggaagttcattgccgccacttcaataatgatggctaagttccgcccgactttaacaggcacggtaatcttcggtacagggacgtcgaaaatcatttgttcttcggtatctgaccctaagcgatcatatttcttatcctgtgaccaattttgcaagtggacaattaacgaaattgacgtttcagcccgcaccgcaccagcaccaaagaggttcatcacatcgataatcccgatgcctcgaatttcaagtaagtgacgcaaaattgcaggtgcttcaccgaccacggtttgttcatcttgttgataaacgtcgacccgatcatcagcaattaaccgatgacctcgtttgactaattccaatgccgtttcgctcttcccaacacctgaatcgccagtaattaaaacacctaaaccgtaaatatcgactaacacaccatgcattgagcgccgttcagctagctttccttccaaataatcggttactaaactcgacaaacgcgttgtcgataaattcgaccccaacacaggaattcccgcttcttcagctgctttaagcatttccattggtggttctaattggcgcgagaccaagaaacagggcgtatcttcagaagccatccgacgcataatcattaaccgttcttctggtgtcatattttgcgtaaatgaaacttccgtccgtccaaataattgcacccgctcgtaagggtagtaattaaagtagcccgttaattcgagtcctggacgggaaatatcactcaccgtcactgctttattttttaaatgtgcttcaccggcataaacttgtaattttaaatcggtgattagtttttgaattgaaacactatcagccatgagttacccgtccttcattttcacttatatcctctatcatattgcttttaaggtgatttttcaactttaatgtaggcgttttcttatctaaacaaaaaaaacgggaccaatgtcaatcttaattgacgtcagtcccgctaactttttaataacgctctctcacaaattgatttgtaataatcgtattggcaattgataagatgattgccacgatcacggctgctccaaaacttgtgaagctaaagtgggcgccgacgaaaacagcggtcaattctaacataatcccgttgatcacgacactaaacaagccgaacgttaaaaacgtaattggaaatgagagtaagctcaacaatggtttaataaagatgtttaaaatcgataacacaatgctggcgactaacgcgatccaaatgttttcaacatagaataaattgggcaataagccagaaatcgcaatgaataacaaagtatcaacaattacgcgtgtccaataccgcattagaaatcactccagtcatcatcgtctactttgacatcacgagcttccttgcgttgacggctaccttgatgtgctgtttcttgataagaatagtcttggtagtcatggcgccagtctgcatgccgtggacgtctacttgggccagcaattgcccggtagatgaagctgacaattaacccaatcacaatcagtggtagcgcaaattttaataataacagtagcgagccaatcacgagactaaacacgccaactgccgccataatggcgataatgactaataaaatcattaaaaaaggcattaaaactcactccattcactttcagaatcatgtttactctgacgtggccgttctggaatcaccatcgctaagatgatgtagaccacaatcccagggaacgctgctgaaaacattgagaatacaacatatagaattcgaactaatgtcgcatcaatattaaaatactcagcaatcccgcccatcacaccagaaatcattttgttatctcttgatttataaagtcttttccccattgttaaaacccaccattccttaattttttagttatcgttgtctttcaataaaatattaccagttgtcgtgcttaatgttaaacgagctgcctgttcattgtcgttacggccaagttgtaacatttgattccccgtactttgccgttgttcgatggtttgggtgtttgcaagccgatttttaatcatcccaaaacgcgtgcgggcatcaacagtcattgccaaagtttgtggtaaagctgtcttgattgtgccattcacagattttgcttttagatgttgtaaatcagttgtcgtcaaagtgttcttgatatccccgttgaccgttgaaacactcgcatttaaaacttgcgcttgaatcaataggttcccgttgaccgttgttgcgagtaaatcatcgtaacgaccttgatcaaaggtaatgccaccgttgacgttttcagcttccaccattgcagcgttggtgctgattaacgttaattcaccgttagtcgtcttcaagtaaatatcccggccggtaaagccatctaattcaacatccccgttcaataacttcacattcgtttgtaagtagttattggctggtaagtagaacgttaagtccgcttgaatccgtttattcggcacttggaagaccaagtcggcatcagtcacatcaattgtactgcgcgcttcaaaagcagccaatggtgttgcttctgccattttaccatataacttcacttgcgctgcgactttgacttctggacgatcccagatttggaaatgtacactaccgttagccactttgacgttaatcatttctggtgttacgtcagaataaacgaattcatggctgaacttttcagttgccaaaccaggcaccttaaagttcacttctttccaatccacattatccatgactgttttggcagtattcttcacgaacttaccaaagtgtgtgctagcttcgcctaacttatcgctcaattcatcaaatgtttcactggcattttctttccagtcatctgataagcctaatttttctgaccattgatttttggtcatttggcggcgttctttttcgatttggttgagttcatccgtcaatgcttcgcgtttggcttccaactcgtcgacttcagcttgcttttgtaataagccagccttgagtgtttgccgttcggttgctttttcactgcttaaactatctaaatcttccatcgtatcaaggacagtgacttgttcttgatcagcgtgcattgcttgcttcaaatcttgcaactgccggttaacgccggaaaggttaacggttaattcgtgtgccttttcttcaattgcgcttttatcagcggttggttgttcagtttgctccgttgctgtttcagttggatttgattttacatcttggtcatttttggctaaattttctaataagactaatgcttcttctgaagttaaaataccttggttcactaagtctaaaattcgttgacgttcattcattgttttgacctccattgatcattcgttgtactgtttcacttgactatgactctattatgccgattttacagtcgattgtcataggtccaaaggttgatttttatttaggtatcaagagtgagaacaaaaaaagcgcaggacaaaattatttttgtcctgcgcttttttgcttaaacgatttgtcctgggtaaggttcgccggcgacaaattggaaatcaaaggttgctaattcatccacactggttagacattgggtaatccctttagccaacattaggttgatgggattggcttgtaaatcatcttcacaaacaaagacgattggtttatgacaggcattcaagtagccgacttcaaacgccgttccagtatcttcgtcttgcatatcccataacacaactgccatgtctgctaaatccattgctgtgatgtcgttttgatacgtttggttggcccattcgtaccccccgaacatgccttctggatcatgatcttctgtcacacccttgtattgatgttcctgtggactatgaatataaccaatcgttgggttttgttttaaagccgcgtgtgcgcgttccactaatgaggcctgtttaggtgtaaaccaaccgccagctaagtatatttgtttttgcattatgattctcccactaaaaaagcgacgagcaagtcgaccttgtcatcgctttttaaaatttttaattgaattgtttagaattcatcttcttgtgcattggagtttaattccactaccttaccggttctgaggtagacaatccattcacagatgtttgtcacgtaatcgccaatccgttcgaggtagcttgcaactaacatgtagtccatgctcccaacgacggtttctgaatcacgttgcatttctttgatacagtcgtcataaatattgtctgaataagcattgattgcaacatcttcatcggcaattttgatggccttcttacgatcttctttgacgtaagcgtccaatacctcttcaaccatttgtttaactttgtctgccatatccgcaatatctttttcgatatcagggacacgggtattacccttgacccgaatcgttgatttcgcgattgaaacggcgtggtcacccatccgttctaaatctgaactagccttcatgattgtgacaatcacgcgaaggtcagttgagaccggttgttgaagtgcgattaactcaaaactcttacgttccaaatccgtttcccgttcattaatcttatgatcgtcagcaatcacctcgcgtgcgagttgcttatcgtgattaatgaaggctttaacagatttatagatggcttcgttgaccatcatccccatttcggagaagcgaacgtgtaaatcatttaactcatcttcaaaaagtcgtctcattgtggtttcccttctttcttagccaaaacggccactgatgtaatcttccgtttctttttcggttgggtttaagaaaatcttcttcgttggtgcgtattcaatcaattcaccttgtaaaaagaatgctgtcttatccgaaatacgagaagcctgatgcatattatgcgtcaccattataatggtatactgttggcgcaattctagcaacatattttcaattttagcactcgaaatagggtctagcgcagaagtcggttcatccattaagatcactttcggtttcacagctaacacccgagcgatacaaacccgctgttgttgaccaccagaaagtgataaagcactttcgtgtaacttatctttgacgtcgtcccaaacggccgcttgtttcaaactactttcaacggcttcatctaagacgcgatgatctttaacaccggataaacgtaagccgtaaacaacattgtcatagattgaaaatgggaatgggttcggttgttggaacaccatgccaacttctttccgtaacttaacggtatccatctcaggcgcataaatatcttggccattcaataagaatttaccggtcaccttcgccgagtcgattaaatcattcattcgattcaagcagcgcaagtaggttgatttcccacaaccagatggcccgatgagcgccgtaatttcattttcaacaaaatccatattaatcccttttaaggcctcattcttaccatagaatagatgcacatctgaggattcaataatcttatttgccacggggcaaacctccttgcgtcctagccaaagtgaccagaaacataatcttcggccgctttaatcttcggccgggtaaacattttacgtgtttcgtcgaattcaagtgcgtgccctgaatggaaaaaggccgtgtaatcactgattcgtgctgcttgttgcatgttatgcgtcacaatgatgattgtaaattcttcttttaagcgaatcaatgtttcttcaaccgtgttcgttgaaattggatcaagagctgaagccggttcgtccaataataaaatatcgggtttcatcgcaattgcccgggcaatacataaccgttgttgttgcccaccagatagtgccaatgcgctctttcctaatgaatctttgacttgatcccacaaagcagcttgttttagtgacgtttcaaccacttcatccagatactttttgtctttttgtccatgttgtttcaaggcaaaagtgatgttgtcatagattgatttggcaaatggattaggccgttggaacaccatgccgatatgttcccgcatcttatacacatcaacgtcatcgctattgatgttcaagccccggtacataatcttaccggtcacacgtgtattagcaatattgtcattcatccggtttaaactccgaagataggttgactttcctgaaccagaagcgccgattaacgcggtaattcgatagcgttcaaattgcaatgatgcatcgtgcatcgcgcgtttgtcgccgtaatagacgtttaaatcttcagttgataaggcaatttcatgttttggttcatctaaatgtttgatgtgcgtttttgttaaatcgtaatctgccattattttctcctatgctgctgtcattttacggtagacacgcttgccgatgacccgtgctaaccagttaaatagtaaaacggcgatgattaagacggcagatgcgccagcagaaaccgcagtcgcatccggcataatcccttccgagttaatcttccaaatgtgcaccgctaatgtttccgcaggtcgcaatggattcaacggactcgcgatgtacattgggttccagttggtaaaatcaagtgatggggcactttgtccagctgtataaatcaaggcagccgcttcaccaaagacccggccggcgcctaaaatcatcccggtaataatgttgggtaacgcttctggaatcacgacatgcttaaccgtttcataacgcgataaaccaagtgcaagacctgcttcacgttgtgtgaagtgaattgattttaaagcatcttccacattccgcgttaacaacggtaaattgaaaacggtcaaggctaaagcacccgctaagattgaaaagcctagcttaaactggataacaaagaccaagaaaccgaataacccgaccacgacggatggtaaggaacttaacacttcaatcgcggtccgaacaacattcgtcacccagttcttcggcgcatattctgcgagatagatgccggcaccaattgataacggtactgaaatcaccatcgccaaaattaatagatagaatgaattaaacagttggacgccaatcccgccacctttagtaaaggtttgcgcaggtttcgttaaaaactgccacgtcacgtgtggtaatccgcgcaccaagatatagccgagcaaacttgctaataataatacgatcaaaccagcgatgagggttagcacaccggtggcaactttatcccatttttttgcatccattagcgacctattgctcccttccgaccaattaaacgaactaataagttaaatagtagtgacatcaataataagagtaacgccaatgaccaaagtgcattattggctaatgaacccatgaccgtattcccaatgcccatcgttaacacactcgttaacgttgaggctggggtaattaagttatgtggtaataacgcagcgttcccgatgaccatttggacggccaatgcttcaccaaacgcccgggccatcccgaaaacaaccccggttaaaatccctggtgtggctgcttttaaaacgactttccatgttgtttgccaacgcgttgcacctaaggcgagtgaggcttcgcgataatgccgtggcacactcttgagtgcatcgactgtcatcgatgtcacagttggtagaatcatgacgaacaaaacacaagtcccggcaagaatcccaaagccactgccaccaaacaaatgacggacagctggtacaatcacggataatccgataaacccgtaaacaactgatggaatcccaacgagcaattccatcactggttgcaataatttttcaccccgcttaggtgagatttcagtcataaaaatcccagcgccaattgcaaacggtgttgctaataaagccgctaagaaagtcactccaaatgaccccataatcattggtaaggcgcccacttctggtcgaccatgactatctttcaaacttggattccaattagactgcgttaaaaagcggcctagattgattttatctttaaagaaggtcgctaacccttttgaagcgacgaagtagaaaatggcgagcacgatgaacacgattaaactaatacagaataaactgattaatttgccccgtgtttcacttttggctgcgcgtgatttcttaagtaaacttgctttaattggatccataattggccccctacttaacctttgtaattgtgccatcaaccgaccgttcaaccgtcatcttagcaactggaatatagcccatcttgccgacttgtttatgttgaacctcatctgataagacatacgccaagaaacgttttgttaacccagttggttgccccttggtgtaaacatgttcatatgaccagattggccatgcattagtcatcacgttttcatcggttggtgcaatgccgtttaatttaaccattgcaatcgaatcatctacgtatgaaaaagcaagataactgatggcccctggcgtgttcgctacaattgatcgcaccatccccgttgaatcttgttcttgagcgggtttagtcttgcgcgacttcatcacccattgttcaaacgtcgtccgcgtcccactaccttgggctcggtttactaaaacaaccggctgatctggtccaccaacgtcttgccagttatcaatttcgccactaaaaatcttcgcgagttgcgtcaatgttaagtttttaatccctaattgcttattaatgactggggtaatgccgacaacagccacgcgatgatcgaccagcttgtccgctttaatgccagccttttcttcagcaaataaatcagaattccccatctgtacagcgccagattgaatctgactcaagccagtcccagaaccgcccccctggacgttaatgaactgaccgctgtgatcagcactgtattgttcagctaacgcttcaatcagcggctgaagggctgatgagccgaccgccgttacggactgaccattttgtttagactggcaaccagccaatagtaataaactgaatgtgactaataagccaataacattacgtttgcgcatgttaatcctccacgaattccatttaaacctcgtaagttccattataaaaaaggtttgtaaaaactaagcctatcaaatgtaaattttgtgtaaatcaagcgtttggtagcttcaaaatgaattcactaccgacacctaattgactctttacggtcaactgcccctctaaactggcggtaatctcgctagcaattgctagtccaaggccggtcccgctcttatgggtcgcgcgcgcttgatcaacccgatagaatcgttcaaaaattctttcttgtaggtcacttggaatgcccaaaccggtatcgacaacgcggataacaatttgatctttttcaagttgcacggcaatcaccaacgagccgttttgtttattatacgtgatggcgttagcgattaggtttttcaagatttgattaaacttcattttctgaattctaatcgctaaatccgttggaatatcaacggagacgtgtaactgcttttgttgtgccttttgttgcatcagttcgagattagcctgcaccaattcacgtacattcacaagttgctcttgcgattggtccttacgatctagatgcgaaagcgctaaaatatcttgaatcagcgcagttaatcgcgtactttcgtcatagatgatttgtaagaattgcttttgcgtggcaggatcttccgccgcaccagctaacaacgtctcagcaaagcctgtaatagccgtcaccggcgtcttcaattcatgactcacattgctgacaaaatccaactgcatctgctcaacgcgccggacatcggttaaatcatataaaatgactaatgcttggaatttcgatttaaccgtattgagttggacaacattcgcatccacaaaccgttcttgattttgaatcaactgaatttcttggtgatgactctttcggtacctaaaagtgtgctcaatcatccgtgttaattcatacgtcttgatatcatcaatataggggtgtttctcagtaacaatcgtcgtctccaataaccgatccattgcttcattgtgcaaaacgacttcacgattttcgttaatcaccatgacgccgaccggtaaatggtcaattaggcggtcaaaactgccctgttgcatggcaatcttctgccgcatatgccgcatatcaccatttaatttattaatttcttgcgcgaggatatataatgacgcatctttttgaaaaataatcggttcgggcacttcttcatgccgaatatgatgaatattagcgactaaaattttcaagtggtcaaagaaatgacggcgttgccgccagaaacggtatagaaaaatccagctaccgattaaatagacaatcgtgaccgataaagcaatcttcggccacgtatgccagaactgttgctgaggcactactaagacaaagttgggccgatctgcttggtgtgcgtaaaacaaatacggttgcttattaactgtttgccgcgtactaaaattggcggcagaatgattccgattgacaatatccgtcactgctttttgcaactttgttttattcggcgattttggcgtcaaaacttgtaagccgttttggcgtaaccacttttgccgatcaaactgtggttgtttgatgattagcgcatagtcggcgccccgttcctttaacatcgcgtcttgttgttgggcaatcaccaaattgacaagcacaataaaacctatgtaaacagccactaaaatagtggctagctgataaaatctaaattgatcatgtttggtcatggttggggtcctccaattgataaccgaaaccacgcaccgtttttaagtaaactggatgacgcggatctgtttcgattttttcccgtaaatgactgacttgaatatcaaccattcgcgtttcggctggataatcaaagccccacaccgcatttaagagtttctcacggctttgaaccttgttaatccgatgcataaagtaaacaaggagttcgaactccttaggcgttaaatggagcttctgagtgccctttttagccacaacttcgccttcatcgaccattaagtcccctacttgtaaaatatcactagggtgcgtttcaacgactgctacaggctgtgccgtccgccgttcaattgcccgaatccgcgcgataatttcgcgtggactaaatggtttagtgacatagtcgtctccccccacttcgaggccgacaattttatcggtttcgctatccttagccgttagaatcataatcggcgtttttaactttgcctcccgaatcttcttggtaacggtaattccgtctagcttaggcaacattaaatctaaaataataaaatcaaacgactgctgtaaagccatcgtcagcgcttgtgcaccgtcagttgccgtcatcactttaaaatgttcttgttccaggttatagcgtaataatgtcaagattgctggttcatcgtctaccactaaaattgtcttcattcatgccaccctttatttacttaattctctgggaataatacaacgcctaactcatgtggtgcatcagcaaaaattgcgccttcagccatccggaactcaccgtttaaatcttgaacctttaaatggcaatacgttggctgactttgaatcgcccgataaaaattatcgttatttgagacagcctcgccattacattcaacaattgtatcgccaacgaccaaccccattttagcagccggcgtttcgcgtaaaatccctaagataaagacgccatcgtagggtttcgtaaagtgcaactgccgttcatgggcactgcgtctactcaaccgccattgtaatgcacagcttagtactagcgcaactgttaacatgccaataatccagttcggaaatgcaacggcaattaacccaaacccaactaacaacaagccaaagatcaaatagctattggcatttttagtaacaactgatttcattaagcctttgactgctttcaaactaaatcccaataacaatggcaagattaccaagctatatgattgatgcccgatatttaagaccggccaaaaacccaaacttggcatatcaattgcccctggcactaagaaaaagaccggcgcaatataaatttgtcgactcataaagaaggccgtcaaccgccctcgcttgctagtcatcacacgcggtgtcacagttgcctcggcatcccaacgttgtaaaacactattgatgacggtcactaacccaataatcaccaataattcagccaaaagacttgcttgaccttccatctgatattggggccatatgaatgttgcaccagcgtagaccaaagcactgattaaaaaggttgccgatacgttttgccatctagcagccactagcaaactcaaaatagcgattagttgatagaccagccaccattgcatattaaccatcgcccctaacactaaggtacagcaacttaaggctagccctgcgagtagcccatggcccacaaaatggcccacttctatccatcgtggattaatcgcaattctaaaggtcttccgttccaagctaattcgtctatgcgctaaccagccagcatacacaatcgctaaccataaaagtggtaccgttagtaatggtcgcaaaatatcaatgatcatcgtcaattcaacaaacccccagcgtctatatttaaataccgtgcgtgtttccaacgacacacgctcgatttccagctgccgaatttcgcagttatcccaatcagtatagcattttgcccccttaactgcctagggttcaaaaaaaaagagtgacgaacaatttaatgttcgccactctttcactaatttagtttaaattttaaggaaacgacgcattgagatgacagaacctaatgccccaatcacaatcccaatcacagccattgttaaatcaagttggaataagaaaattcctggtttcaacattgaataaccggctgaagccatgctgagtgccatatgacggtaaacccaaccataacctaagtcgattacaataatgggaataattaccccaagtaatccaacccaagccccttcaaaaaggaatggccagcgaatatacgcgttagttgccccaactaaacgcataattccgatttcgtcgcgccgcgataaaatcgtaatccgaattgtattggaaatcaagaacactgccacaaagagcaataataaagtaaaaccaacgccccatttacggacgctactcattaccttgaacaacttcttagcgttgttcccaccataagtggcatcataaacgtatttcaattttttcgcttgtttagcgactttaatcgtttgacttggttttgtcgtacttactgtgtaaacatcgtacaacggattatcgtctccggtaaacatcttaaatgattgaccgtaactgccgacaaccttgtttaattcctttttacgacttgaatacgtcacttctttaacagacgccattttttcaagtttcttttgtagctgatctttttgtttacttgttgtgccccgttcaatcataacccgcacgtgcacatcattttcaatatcttgtgaaatcttgttaaagttgaagatcatcgcaaagaaaatcccgactaataacaacgttacggtaactgcactaacagctgcgattgacatccagccatttcgttttaaactcttaaaactatcgttgagatgacgcttcaatgttctaatcttcatagccgtagtcaccttctttttcatcacgaactaagcgaccgtcttcaatcgctaagacacgatgggtccgttcgttcaccatttgtttgttatgggttgccattaagacaatcgtcccacgttcattaattgcttctaaaatatccataataccatctgacgtttcaggatctagattccccgttggttcatcggcaatcaacacatctggccggttcacaatcgcacgtgcaaccgcgacccgttgttgttccccaccagaaagttcatttggaaagcgacgaatttcacccttcaagccaactagttcgagcacttctaatacacgatctttgattgcttgaggttctgcctcgatcacttccatggcgtatgccacgttttcaaacaccgttaaacgtggtaataacttgaaatcttggaaaacaacacccatcttacggcgtaagtatgggacatcgtgatccttcataccgattaaatcaaaaccagcgacttcgatttcaccactcgttgcttttaattgatggtacaacatcttaatgaatgttgatttaccagcaccactgggaccaacaatataagcaaattcgcagggttcaatcgttagcgaaagatccttaattgctgtcacgccatttggatacttttttgacacatttgtcattcgaatcaattggggacactcctttttttgtcgttatcattatttattgtcaatgaaaaccgcaatcttttatattatagcatgctatttattcaaataatcacaatttgattacatttatatttcaatttctttgcagctagtcgggattcttctgactcaactgccattgcagataggcatacataaatggatccaaatcgccatccatgactgcttgcccgtttccggtttcgtagtcggtccggtggtctttaaccatcgtgtacggatggaatacgtatgagcgaatctgtgagccccagccaatttcaagctgttcgcccttaatagcagccgcttttttcgcctgttcttcttgttctttttgatacaatttagccttcaacatattcatcgcagtttcgcggttttgcaattgcgaccgttgcgcctgtgatgaaacaacaatcccagttggtaaatgcgttaaccgcacggctgatgatgttttattgatatgttgcccaccagccccgcttgaacggaagacgtcaattcgtaagtcttcggtgcggacttcgatatcaatcgaatcatccaattccggcatcacatcgactgaacaaaacgaggtgtggcggcgcccagctgaatcaaacggtgaaattcgtacaagccgatggacccctttttcagaacgtaacatgccatacgcgttgtgccctttaatcatcaaggtcacactcttaatcccagcttcttcaccggcctggtaatcttctgtttcaacggtaaagccgtgtgcatctgcccagcgtaagtacatccgcaaaagcattgaaccccaatcctgagattccgtaccaccagcaccaggatgcaattcaacaatcgcgttattgctatcgtagtcgcccgatagtaattgtccgagttcatattgttgcatctgagcttgaacagccgtcaaatcagcttcaaaactcgtctggagttcagcatcgggttcttcttgtaatagctctaatgtcacttgtagctcttctgattgcgcttgaagttgcataaaagagtcgtatttttcctttatggcgttattttgatcaattaactgttgggctgctttttgatccgaccagaaatcgggatccgccatttgcgcttcattttgcgcgatgctttcttgcaggccatctaagtcaaagtgaccccctaaattgcgttattttagcttcaattgcttctaaaagatgttttgcttcacttaattccatattttagtccctccactattttttcccattaaaaaatggctaagttaactacctcagccattttctacgcgttagcgtcgaatattttgacggatttccgccttcatgaagagccgggttgtatcgtaatcgatgtcgctgatcatttcttcaaacatccggtaaccttcttcttgatattcaaccaatggattcatttgaccgtagccccgtaatccgattgagttgcgtaattgatccattgcatcgatatgatcggtccagcgttcatctaccacacggaggataacgactttttcgaattcgagcatttgatctgcatctgctaattgtttttgttttgttgcgtaattcttttctgcaaaggtcatcaataatgattcgatttcttcagcagtcttaccttgtaatttttcaattggtaattcttcttcactgaccattgaagctgtggcaaatgcgtggattgcttctaattcccagctccccatttcaccttgtgtatgcaattgcacaatccgtttaacggttcttgaaatcattggcatgataacttctttcaaattatcttctgccatgatgacctgcatccgttgtttatagatgacttcacgttgttcacgcatcacatcatcgtattgaagggtttgtttacgtgtatcgtagttattcccttcaacccgtttttgtgcggcttcaacttgacgcgtaatcatcttactttggatcaccgcatcgtcatctgaaatcttcattcggtctaggaaggctttaatccgttctgaaccgaaacgtttcatcaagtcatcttccaatgacatgtagaattgtgtgacaccaggatctccttgacgaccagcacggcctcgaagttggttatcaatccggcgtgattcatgacgttcagtcccaataacagccaaaccgcctaaatccgtcacaccaggtcctaatttaatatcagtcccacgaccagccatattagtagcgatagtgaccgcaccacgttgaccagcattcatgataatttcagcttctttaaagtgattcttagcattcaaaacagcgtgtggcacgttattttcatctagtaatcgcgatagtaattctgaagattcaaccgcaacggtcccaaccaatactggttggcccttagtataacgttccttgatatcttcaataaccgccttaaatttactttccaaagttggataaagcacatctggtttatcgattcgggcaattgggcggttagttggaattgagataacttccatgttgtaaatttcgcggaattcttcttcttcggtcttcgccgtcccagtcatccctgataacttgttgtacattctaaaataattttggtatgtgatattcgccattgttttggtttcatcttggatttcaacgccttctttggcttcaatcgcttgatgtaatccatctgaataacgacgaccatccatcacacgacctgtaaattggtcaacaattaggacttcgccttcttgaaccacataatcaatgtcttttaacatgatatagttggcccgtaatgattcgtccaaatgatgcgtcaaggctgtattttcagtgtcatataaattgtccaagccgaagttagcctcagctttttcaatccctgattctgttagactgatggtctttgttggccaatcaatcttatagtcagtttcttcttttagagttttaacaaaacgatcagcacggatataaagtgctgttgacttttcagcttgaccagaaataatcaatggtgtccgcgcttcatcaattaaaattgaatccacttcatcgacaatggcaaagttcaatggtcgttgaaccatttcttctttgtaaaccaccatgttatcgcgcaagtaatcaaacccaagttcactattcgttgaataagtgatatctgagttgtatgcgtcgcgtttttcttctggtgtcttagcatttaagtttaacccaacagaaagaccgagccagttatataattcacccatttccgttgcatcacgacttgaaaggtattcgttgacggtaacaacgtgaacgcctttaccagccaatgcatttaaataaacaggcatggtagccgttaaggttttcccttcaccagttttcatttcagcgatgttaccttcgtgtagcgtaatcccaccaataatttgtactcggaacgggaataaccctaaaacacgtttagcaccttcacgcgcaaccgcaaaagcttctggtaaaatatcgtctaatgtttcaccatttgctaatcttgttttgaattctggggtcttagcttgcaacgcttcatcagataaattactatattcatcttcatagctttgaacttgatcggcaattttgcccattcgcgctacttcacgtttatcgctttctacccatgtttttagaaagtttgccatgtgcgtcaattctcctctagaaatacgtttgagttcttaaatagcgatttcttatatagtcaatatgattactaacaattcattttaccatttattacaatcaaataaaaccctgtcacagtaaacaatccagccaattcagtaaaaatttaaccccattatctatatggctacaaaaaagggctgagcgcaactcatcgttgtcccagccctaacttaacgttcacttattcatcagtttcaatcaaaccgtaacgaccatcttgacgtttataaacaatgcttgtaccgtttgtttctgaatcttcgaagatgaagaactcatggcctagcatattcatttgtaagattgcttcttcactatccattggtttcaatgaaacgcgttttgttcgaacgacttgcattgattcttctggtaatgcttctgcttctggcaccgttaattccatacccttaatcccgcgttcacgtgatttacggttaatctttgttttaaatttacgaatttgtctttctaatttatcagtaactaggtcgacgctaccatacatatcaggcgatgtttcttctgctcttaatacaaggtatggtaatggaatggtgacttccaccttagcggttttatcggagtacacttttaaattaacgtgtgcagttgcggtcgctgaatcatcgaaatatttttcgagtttgctgattttcttttcaacataactccgaattgcgtcagttacctcaatattttcaccacgaacattaaaacttagcatatgaattctcccctttcacaaataccccctgtgggcacttgtcgctcggaactcaattctttcccgaggctttgttactgacttcattatatataatttgcgcgtaacacacaaataatatggtcctagtggactaaagtaattgcgtgaattggcagcgtttggtatcgcttgcggagacactgctgagcatgccataacgtgcgcccagtggtataaatatcatccaacaaaattaactgctgcaccttggaacccaacagcacgttctgcgcgcatttaaaaaattgcggcgttgctaagcgctctgcacgatttttttgtgcttgtcctttttcagttggtagcttctgcaacaatggggtcagtggaaaacagtcctcgtataagccaaccaccggattgaatccgcggctttgcaaatgtgttggatcagtcgggactgggatatacgccgtttgccgttgcacaggaaaattttctcgaatcagccgttgaaatacgtgacgtaatcgataatccccctgccccttatagcgttgaaaatactgttgcattggttcgttgtatgttaacaacgctcgattagtaaattgttcgcctggatacagttgctgccatctctggcaatccggacacaccccctgggttgtcatttgccgaccacatcccgaacaacactgcggcccaatccgttcaaactgtgccatgcaacgtgaacagatcatcgccggatagactggtcgcaatgaacaaatcaatgcaatggagggttgttcaaggataactgccgcacacattaaacagtggattgtaatcgccgtccttttcgattttgtcgtttaatttgttgacacgcacgctgaatagcgaccgtgtaatccgcgtagaaaaaataaaccggattggcagcatgctcttgctgtcgtccggctcggccagcaatctgtacaagcactgattcagtgaagaccacgtgttctgcaccaagaacaaacactgcaatatttttaaacgttacgcctcgttctagaactgtcgtcgtaatcagcacgtccccgcatcctgctctaaaggccgctatcttgtctaattgattaggatcgccagcatgtaccgtgttcactgtaatgtgtggcaatgcccgaacaacgctctgctgaaccgcctctaaatcccttacctgtggcacaaataataataagcgttgttcttgaagacacttcctgagtaagttgcgcatcacggatggtaactgatgccgtttaactgaacgccgccacgtaaacaagggatagcaatgcggttcaggtaataagtgaccatgaaagcgaattggtagctcactacccgttaaatcccctgtattaatcgcatggcgcaactttacagttggtgtcgccgtcagatagatcaatgcacagcatggcttacacgcctgtttaacagccatctcaagctggggattattgacaaatgggaacgcatcaacctcatcgacaatgacagtgtcaaatgcctgataaaacttaaataactgatgggttgtacaaacaactaacggcgtataccggtaaggcgcagtctgttccccatgcatcagcatgattggtgtgttagcaaacgctgcttgcaagcgcggatagagttctaaacaaaccgccacccgcggcgcagcaacacacacacgctgcccattagctaaagccgtcgcaatgccttgaaataacatctcagttttaccagcaccggtcactgcagttaagacatggcgttgttgcttggtaatgaccgcaacaatctgctttgcggcttgtgcttgaaaaggggttagtgtccccgaccaagttagcggttctacgatcgactcaaacagattgcattcaggcacgtaaaccaactgatccccttccactaaccgcccaaaggtcaagcaagcagcacaataataccgaccatcaggtaagcgagcttgctctttcaccacttgtccacaccgttgacataccagacgctgattaactatttgaaacgctagtcgctgtttaatctgtggtaaactataattattcataacggtactcaattgggtggcactccactgacgaccataagcaagttgttttgccatcatttcaccttccacccttagttccgttaaatccagcttattttttcaaggagtccggtatgcaaagttattttaccgttcaaaaagacggcgaatttgaactcgaaatcaaaaagtcacgcttcatctgtcatgttgcgcgtgttacagacgaaaccgcagcacaagcgttcatcgcacaagttcgcaaagcaaatctgaaggccaatcataattgtttcgcctaccaattaggtttaacggccaatattcaaaaacaaagtgacgatggcgagccaagtggcacagccggcgtgccaatgttagaagtactgcgccagatgcagctcactaatctgtgtgtcgttgtcacccgctattttggtggcatcaaacttggtactggtggtcttattcgagcatacagtcacgccacttcggccggacttgaacacctcggtattgtccaaggtatcgaacaaaccgcttgtcagattacaattgactacgctcaatttgacactgtgcaaaatttacttagccaattaaacctcactgccgaagacatccaatatacgactaacattcaaatgaccgtctggttagcgactacagcagttagtgatttacaacaacaattaaccgaacgcctcaacggccaattacaattcgaccttggccctcaacaattcaacgaagtccccattagcgcacaggatttacaccagattcgctaccaataacgcaagaaaaggattagccaatggctaatccttttcttcattcttcggttttaataatcgttttaaaagcatcaataatgggcggcgattgtcaccaagtaacccaattgattcaacaaataattctaagccaattaagacggctaccgtcaatgccaagcttccccagagtgtcgatagtggatagagcaatgaaatcaacgagaagaccaatgccagtccataaatcacgagaaccgtttggcgatgtgataaaccaagttgcatcaaacgatggtgtaaatgatgtttatctgcttgtgaaatgggctttttattcaaaattcggcgcaacattgcgtaaattgtatccgtaattggtacaccgagaataataactggaatcaataacgtaatgaacgtcacgttttttaaacctttgagcgataagaccgcaatcataaaaccaatgaataaggccccggtatcccccaagaaaatcttcgctggatggaagttatgtggtaagaaaccgattaatgcagcgaccaaacaaaaaatcatgattgagacgctgacattggtgattgataagaagaaataggcgatgacgcccattgtgaagagtgcgataatcgaaacgccagttgctaagccatccaacccatcaatcagattaacggcgttggtaattgccagaatccaaaaaatggtgattgggaagcttaaccatcctagttcaaaggtgcctaaaaatggaattgtcaaaatattcatgcggacgcccgctaagaaataaatgaccaatgctgctaataaaataccgagcatcttttcctttggattcaattccttaatatcatcgatcatcccagtgatgatgatgatacattctgctaagaagatactgaaaagttcgtgtgtttggaattgcccgcgtaataatacgaaggtcccaaacgtaaacgcgataaaaatggccagaccacccattgccggcatcgcctttttattcactcggcgggcatttggtttatcaactgcgcctaaaacaaacgcgaggcggcgcactaatggggtaattgcggccgatacgagcatcgtcgcaaatagaccaactataattttaaacatgggttgcattcaacttgcctactttctcttgcattctctttattatacaaatcaaacccgttaaacacaacaatgacttgatttcttaagcaaaagccaagcaccctgattatctgtcccgcacaatctgggctaataaggccgtaaatcgtggatcagcattaaagggatgaatgtaatcaaattgttcgccttgattatccataaaatagtcccgattttcaacatcaatctcttcgatagtttccaaacaatccgcaacaaagcccggggttaggaccaaaatttttctaacgccttcttgggctaatgactgcatcgtagtgctagtggccggtgttagccattcattcggtccaaacttagattggtatgtggtccgaaaagtttgtttaggcaagcgcgcctgcaatagcgcagtagttgcttcacactgtgcttggtacggatccccttttgttacgtacgactttggaatcccatggtatgacaaaataatttcgtcataggtttgcgtctgtagcttctgttcaatcgccgttgccatcaagtcgatatagcctgagcgttgataaaagtccttcacaaaatgcaaagttggcatgtttgattgttttaaataaaactgcgcaactacatcataaaccgacatcgtcgtagtcgttgaatattgcggatacattggcacgaccgtcaaatcatcgattcccgccgtttgaatctcactaagcacatcggttaagaatggttgactatatgacatcgcctcaaaaacttgataatcgggtaattcagcttgtaattgagcaacttgctgttgcatgtacacttttaatggggagccaaaccgctttgggcatcgcaacgacccgctgatcagctaagaaatgttttaaaaaatggcgaatttctttgacttctggtttatctggggtccccaaattaactaataacacaccttctttcatgataatgtcctccacaattttaattaaaaccaaaaaaagagcggggaacaaaattggttttgtcccccgcttcaatgttaggccaatccgcattacttcgcgtattcgaccgttcttgtttcgcgaatcacagtcaccttaatgtggccaggatactcgagttggttctcaatttgattcttcacatcacgtgctaagacggttgcttggtcatctgtgacttgttctggtttaacaatcacccgaacttcacgacccgcttgaatcgcaaaactatgatcaacacctttaaaactattcgtaatactttcaagtttttcaagacggtgaatgtagttttcaagtgattcagaacgtgcacccggccgagccgctgaaatcgcgtcagcagctgcgactaagactgagataatcgatgttgcttcagtatcaccatggtgtgaaccaattgcgttaatcaccgttgccggttccttataacgcgttgctagttcaaccccaatttcaacgtgggagccatcgacttcatggtcgagggccttaccgatatcgtgtaacaagccagctcgtttagcgagtgtcacatcttcacccaattcagcggctaaaatccccgttaacttggccacttcaattgaatgattcaagacgttttgcccgtaacttgttctgaaatgtaatcgaccaagaatcttgattaaatcaggatgcattgtgtgcacaccaacatcaaagattgcttgttcaccgatttgtctgatttgttcgtccatttccttgcgtgacttatcaaccatttcttcaatccgagctggatgaatccggccatcttgaattaacttctctaatgtcatgcgcgcaatttcgcgacgaatcggatcaaacccactaagcacaactgcttctggcgtatcatcgataatcaggtcaatcccagtcagtgtttccaatgtccggatattccgaccttcacgaccaataatccggcccttcatatcatcatttggtaacgtcacaacagttactgttgtttcagcaaccatatccgctgcactgcgttgaatagcttcagcaactaatgtacgcgcagtccgatcagcttgttctttagctgtttcttcactttctttgattaaaacagcccgttcatgttcaaggtcttgtttcgtttcatccaaaatgattttttgcgcttcatcatgcgataattcggcaatttcttgcaacttcgctttttgttgctcaactaaagtggcagcttctgcctgcttttcagttagctcttgtgcttgattcgttaaacgattttcacgttgctccaatgaacgttcttttttatccaacgttgcatctttgcgatccattgtttcttcccgttgaatcaaacggttttcttgcttttgtacctcactgcgtcgatctttcaattcattttcaatctcagaacgatagcggtgattttcatcccttgcttccaaaagaatttctttcttccgcgttgcggcttctttttcagctgctgcgattattcctgtggcagtcttatttgcaccatcaatttcacgttcgtgcgccttcttttgtagaacggaaccaactagtaaaccaacgattaacatgatgactgcgaggattaatggaaaagctaagttcattgtttcacctccgcatcatcaaaaattttgaattgcaactttcactgcaaatttttaaagatgttattatgtttagtttttcaacacatagttattttatagtttcataaaccgcctgtcaacttaaactatcggcattgcaaccgttttcgagttcagtcaatcaaatcgaccatcagaataattcggttaagcaatcaaaaaagctgaagcaaaataacttttgcctcagcttaatgattcttattcgtttgaatcgtcatccgtaaagacgtcgagttgtgtttcatcgctttcatctactgggacatccgaaataccatatgcttcccgaactttaagccggacttcatcttgaacttctggatgatcagccaagtaattcttcgcgttctcacgtccttgaccaatgcgttcatccccataggaataccatgacccactcttattaataatgtccttttcgaccgccatgtcgaccagttcacccgtttgtgagatcccttgaccatacataatgtcgacttcagccactttaaatggtggtgccaccttattcttaaccactttaatccgcgcacggttcccgatcatatcggtcccattcttgatggtttcagcacgccggacttcaagccgaacggttgaatagaatttcaatgcgcgaccaccaggtgtgacttcggggttcccgaacatcacgccgactttttcacggatttggttaatgaataacgcaatcgtctttgttttattgattgttcctgataatttccgtaaggcttgtgacatcaagcgggcttgtaacccaacatgcgcgtcacccatttcgccttcgatttcagcacgaggcactaaggctgcgactgaatcgacaactaaaatatcaacagccccacttgaaactaaggcatcggcgatttctaagccttgttccccagtatctggttgtgacaagagtaaatcgtcaatattaaccccgagggcagttgcatacttaggatccattgcattttcagcatcgatataagcagcagtcccaccttgcttttgcacttcggcaacagcatgtaaggcaacggttgttttacctgaactttcaggaccataaatttcaacgattcggccacgtggatacccacctacaccgagcgcttcatccaatgcaagggaaccagatgaaacagttgagacttgtgtatcaaccttttcacccattcgcatgattgagcccttaccaaaattcttttcaattttctttaatgcagcatctaaggctgcttgtctttcatctttagccaattaagtgccctcctcaaaagagtccttttcagtactctcttagtttaccgatttcacgaaataaaagcaagtaaaaatcgaacaaacgttctatatattttttaagctactctactatacccgaatcaccgcgtttttttcgtgctttttgggttaaaaaaactggcgtgggattccccgccagtttaagtttatttagaaaatgagtctttaaagacgcctctgttcttgatgaaataatcggtacccgaataaactgtaaagaacaagcaaacgtataacatgatctgtgccattggaatgccgatattgttaaagaagacgttgttgagtagcaatagaataatcgctaacatctgcgtcgtcgtcttaatcttacctggcatagctgcggccatcacttcgccaccttcgcttaataataaacgtaggccagtaacggctaattcacgccaaataataatcgcaaccacccatgctggcgcttgatctagcgccactaagaagataaatgctgtcatcactaataatttatcagccaatggatcagcaaacttaccgaagttggtcaccaaatgttgtgatcgggcaatcttgccgtccagtaagtccgtcaaagaggctacaatgaaaatcactgttgcaataatcgcactgactggaatacttgtcccagcgaccataatggctgtcgcaggcacatccaatactaaaatcaaagtaaaaatcggaatcaaaataatccgaaacatcgttaatttatttggtaaattcatgttgaagactccttaatgtcctttatttagccaatgttgctgtgaaattaatcgtccgcacaaacgttgcttcgttatttggactaaggttaatatcggtgccattaatcttcatcttcgttgcaggtgcattcccagtttgaatactaaattgcgtaacgccttcaggtaattcagcagtttgttcggcaccaactgcgacagaaccttgccaaatttgttggccattggccgttaagctgacccaagcagctgatttatcagctgagaacgtaatttggttggctttagctggcaagttcttaatttcaaaagcttgttgtgacccattaatgctggtcatcttcgccgttaattcttgcttcttagccttatcttcagcagctttcttgctagcttcttgtgccttactttcagaagcggctttcttactgctttcagcagacttgtcttcactactgttatccttcttaggatctggtttatccccagaaaccgtaaccgatgagcttgtttcgtttaacgtttcgcggtctttaccacggttgctgagcgcaatcccatagaccaccccaataatgatgaccacaattgccacaatcgtaatttgtgggacaaggttgcgccatttcgaccatttagaatctgttgtttcgcgcgtcaatcgggtttgattttcaacggatttttcaacatattcttctggtttcgtatctggtacagcatcttggtattctgccaacaatgcatcattatctaagcccactgtttgggcgtattgcttgataaatgcccgcacgtaaaaactgccaggcaaggcatcaaaattgccctcttcaatggcgattaaatatcgtttttggatttttgtgatttgttgtaaatcatcgagtgtgtagcccttttcaattcgtgcttcacgtaatttttgaccaatttcattcataatcaattccacccactattatcccagtatcattatccataattatagcatattggtacgtatgtgcattattaagatttctttattttaaccaaccaccattaacgtacaatgtctgtcccgtcatataatcggctgcaggtgccattaaactcaatacccaataggcaatctgcgctggggttgcaaaagcaccggccgggatctccgctacaacagcagcccgttctgctgttgtgaactgattgttcattttcgtatcaactgcgcctggtgcaaccacattaattgtgattccaagcgatgccacttcctgtgcataggcgttcacaaaggcggattgtgcgcctttaactgtactatatggcacttccattgcactgccccggccaccatagattgaaccaattaaaacgacgcgtcctaatggactttgcgctagtttcgcttgcagctgctgcatcaatagcattggtgctttaacgtgcacctgccataagtgatcgagtgccgttgcactgacctctggcaataagccatacgtcgtcgcacctgctgtataaatgaccgcatcgacttgaaaaagctggcctgtcaattttccaacagcgtcctcttgggttaaatcagcttgaagcgcaaaaaaatcctgttttgggtagtcttgcaacaattgcttttgcagcgtcgtaacccgcgtctgattttgatgatagtgtaaataaagcgaccaaccgtccgccgccatttcagtcgcaaccgtcatcccaatatcaccggatgcaccgataattaaggctgatttaggcatggtttgctccctccggtaagatgtggcagactgtcatcgtttcaattttgaaataatcggttgccatctgttgcaagtccgctaaagtcacttgttcgatcaaacctaagacatcaaatggactgatttcggtaaagaattcatcactatattggttcgcaatggcttctagcgaattgaacgcttgcaagtattcaccaattgcggctcttttaaccaacgccaagttatcctctgaaaagtcaggactttccgtggcatgttctaagatattaataatcgcatccgataattcttgggcattgtccgcatcgccaccaagggtcacaaaattaaatgaccgttgaatggcaaattcgtaaccaaaactatcatcaagtgtgccatcatcgtacaacttttgcacttgcgttgatgaatcaccaaatagcaattcaagtaacaagttcatcttcaactttgtttcaagtgctaactcacctgttccgtaatccgttaaacctttaatcccgaccatgctcttgctacgcgtaattggcatttcaagtgaccgatacggaatgatatcatgaccatcttcagcttcttcaggcaatgaacgtacaatttctgttggttgggcaaatgtttttgccgcttgattggcgttcaaccaatcaaccacttcatccggatcatcaatttgcccaacgataaagaggttcatattactaggctgatagaacgttgcatgtgcttgatagagcgcttctggtgtaatttgcgcaatactctcgaccgtgccggcaatatctgtccgcaccggatggcttgggtaaagattgccaatcactgtatagaataagcgccaatccggttcatcattatacatctggatttcttggccaatgatgcccttttctttttcgaccgtctcagttgaaaaataaggttcctgcacaaaatcaagtagaatatccaaattttcttgcaagtgactggttgttgaaaataaataactcgttcgcgtaaaactcgtaaacgcatttgagcttgccccgtagcgaccaaacttttcaaacgcatcgtaatcttttttctcaaataatttatgttccagaaaatgcgcaatcccgtctggcactgtcacataatccgtttccccagctgggataaacgtcttatcgattgaaccataattcgtcgttaagattgcatatgtcttatgataaccgctcttagggtatattttaacggtcaagccattctctaattcagtttcatagagggtttcacctaagcggggattttgtctaagcttcatctgtatcgacccctttcaggaagtaaatggcttgcaattgcatctttgcggcttgttcttgaaccgcttgtttagaaaccgccaagatggcctgtgtaaatcgctctgcatcaatttcagtttcaggcacaaacaaacgattaaattgttgttgccccaaataggccgcactatcgagactcgatttaaattgattaatcaaggccaacttagtttgttcaaagaccgcctgttcaaagtcacccgcgataatccgttgacgttgggcttcgataatctctaagacgcgatctttttggcgactttcaatcccagtctgtaccgtaatgacaccccgaaaagcatcgattgcacttgaggcatagtaggctagactcgctttttcacgcacattggtaaaaagtaacgacagcggtgtgccaccgaataaggcgttcatcaccattgtggcataataatcagcttgatagaagtaagctggcatttgataggccatgtttaacttgccttgttgcaccgtttgtacttctgttttagtttgcacttgtggatataacgattgttgataaaaaatcgttggcagttcagcattacgcggtgcaaatggcaattgtgccaaatccgcgaccgttttggcttcgtcgatattaccgacaaacgtcatttggacccgatcgtttgcaatcatcgattgataatacgcatatagttcatccggtatgatggttgctaaatcagctgcatccccataattgggaatttgttgcgtcgcatctttaaaatagagtttgcgtaattcaaccgccgcgtatgattgcttatcatcggcaacactttcgatgtaacgcactaagttctctttttcacggttaaaaatgaccggattgaactggccatcaaccacatctggatgcaataataattgcccgataaacgcaatcgcttgctcttgcaagtcgattgtatcccgtagatattgggggctcacaattcgcattgagatgctaaaaatcgccaagtttccttgtcgataggcattcatattaaagccggcaccatacatggcttgtaattcattcgcaattgcgacttggtcacgataggcttggctactagcacctagaacgctcgctaataatgagcgtcgggtcatcccatcagctgtgacgggcgcaattaattgaacggttaatctaattgttttaaattggttagtttgtaaaatattcaggtagacgccatccgttattttctgattcacgttatattactcctcactgtttcaacagttaaaatggctcttttcaacttatcctttttcatagcacggattctatcataccaaaaaaagaaggtgaactcaaaaaaggccgcgacaaaagtattttttgtcgcggcctttttcatttaatagtttaaccgagttccatcaaccagcgcctttcagttaatcctgaatgtcaatcaatcgctgacgcgcttattcgccattttaggcgatatttgacttatgtcacacgctattgttctgttggttcttctggtacgttttgtaataacaccttgcgtggcttactaccttctgatggtccaatcacaccacggctttccatctcatcaaccaagcgtgcagcccggttatagccgactctaaaacggcgttggagcattgatacgctagcggtttgctgtttaacgaccaattcgactgcctcttggtaatattcatcttctggttcttcagttgattgcttttcctgctcagtggttggaatcatttcttcgtcgtattcagccgtttgttgtgctttaataaacgacacgatactttcgacatcctgactcgaaatgaaggcgccttgcacccgtaatggtttgctcatcccgattggcatgtaaagcatatcaccacggccaagcagtttttccgcgccactgccatctaagatggtccgtgaatcaatcccactggatacagcaaacgcgatccgcgatggaatattggccttaatcaacccagtaataacatcgacagatgggcgttgggtagcgacaatcatgtgaatccccgccgcccgagccatttgtgccaaacgaataatcgcactttcgacttcgttgctggcaaccatcatcaaatcagataattcgtccacgatgacaacgatataaggcagtggtgcacctttaatttcgccgtcttcgttgtggccttgaatatactgattatattcaatcatgttccgctgacctgtatcggcaaataattgataacgtcgttccatttcttttacaaccttgttcaaggcgttcgcagcctttttggcattcgtcacgacaggaatcaatagatggggcacgccattatagacgtttaattcgaccatcttcggatcgattaacatcaatttaacttcgtgtggtttggcactcattaaaatacttgtgataatcccgttaattgcaacggacttcccactcccggttgaaccggcgattaataaatgcggcatcttggctaaatccgacatgatgaccttacccgaaatatctttacctaacggcacagcgagtggtttgcctggatgtgggggttcttgttcaatcatttctctaaaggaaacggtcgaaacggtcgtgttcggcacttcaatcccgacatacggtttacctggaattggtgcttcaatccgaatatccttcgccgctaatgcaagcgccaaatcatccgctaagttaacaattttagagactttcaccccaactgccggttgaatctcgtacttcgttacggctggtcccagactagcactcttaaccgtcacatcaacaccaaacgaatcaaatgtttgtttcaagacctgttgattcttctcgatggctttatattccgcactctgatcagacgccggaatttgcgttaataatgctggtgttggcaattcgtaatcatcatccgtctcgttcagtggtgcgagttctgccacatctggaacatgctcatcttcgtcagccaccggttcgggtgcagttggttctgcttgcgtcgcaattggttttggtagatccttgggaccgtttattttaaaaggttccaatttttgcttcggtgcattttctggaccatccgttgcgaccatttgctctttagtctctgacgtctcttctgcttgttcagttgcattttgaacagctttttgcgtctgttcttttaaagcactgacttgcgctttacctttttcagagaccttttggaaccctgatttcgtgtagccgccagctttaaagagcccatgcacaaaccgttgtgtactctgaacaacgacgctgaatggaatatctaagaaaacaaaaacgccgataatcacaatcaagacggctatcagataagtccccatctgcgcgaacaagaagtggaaaacaccatacaacgcggcgccaattaagcccccgccaacttccgtcgtaacggccatcttctggaagtcttccaataaaagctgccatgtggcggccaagaaatggttattgaccgcttgatggtgcaagacgaatgctgacaaccaaattaaaatcccgagatacgcgattgcaaatccaagcgtcttttggtgccataaggggggctgcttgccataaatcaacaaatagacccccaaaagggcgaataaaatagcactaataatgaacgtatcgccaacaaacagacggaatacgttagcgcaaagcgcgccgataaagcccagctttaaacccgcaaataaactaattaaaataaaaataaacccgatgatgttaactgtgaaatcagtttgttgttttttctttttgcgtgctgctggttttctttttttacttttagtggccatgaaaatctccttcaaccttaaatcctactatccattatacacgaacatctgtactactaaacccataaatgtcagtcccgtaccgtttttaatcacggtactaaaaaaggccacggcaaaattgccgcaacctttcgctgattagtcttcgttggcttgcgctgtaaattggagttgaacgccccgatttaaagcaaccgccgtcacttgatacgtcaatgtttcgatgtattcaatcaatggtcgtgaaagcttcatcatgtctttttgatcaatttcatttggttcaccaaagaaatctaagagttgaaccacttgtgaaatttgacctgacactgcaaagccactcttttctggtgcaacttggaaaggcgtcacaatttggtaaatattccccgcgctcaaatcagcttcttgtaaatatggatcttcttcgctgatggtgactaagctgacttggatattttgttgtggttctacatcaggtgaaacacggtcataatgaaaagcatcaacagtaattggatctttcttcgtttgcatcaaaaacactccctattttaatttatcattgtcgtacaaatgactcttttcgagtcctggaaaatcttgttggcgcaatgcctcaaagatcactaatgccgcacagttcgagaggtttaatgctcgaatatggtcggacattgggattcgtaaacaccgatcttcattttcacgcatgaaagtttcaggtaatccggtcgtttccttaccaaacataaaataatgatcaacacttgtatccgacacatcttgatcagaataagcttgcttagcaaacttcgtaatcaagtataaatattgacgatcgggcacagttgctaaaaaggcatccaagttcttgtgataattaatcttaacttggtcccagtaatcaagaccagcccgttttaaatgtttatcatcggtttcaaagcctaatggttcgattaaatctaaaacagtatctgttcctgcacatgtccgcgcaatattaccggtattggcaggaatcagtggttcgtataatacaatatgattagtcacggtctaaacttccttaaaaaagattcagtagattaattatacaatagaattcacaaaagctctaccttgctttgcaaataaaaaaacgtagtccctcggttattcacggcgagaaactacgttagtgtcatttcatcactagcttttatcaaaataaattctgataaaagttagggaaaaaattccttaaaaacattatagcgcccttattttagagttgcaatcagatttttaaactttctttaaattctcatcattttcccactaaaatcgtgacatctaatgaaatttcaggtagcgcttctaacgtgattgccgctaattgtgccttagaagccgtccacgtcaatggcgtcatttcgaccaaatcgcgcaatgtctcgggtgttaacgtcattgttttttgaacttgcatttcttgataatctggaaaatgttgcgcaaacaattctaagaccggaccatgatcatagctttccttagcttgaccatgatacagtaactcccgtaactcatgtaagtaacccgcattgggaaccaccttaattagttgaccacccggtttcaagacacgtttaaattcttgatattgcgaaggcgaaaagatattgagcaccgtatctaactggtgatcagcaaatggcatccgcgctaagtctgctgcacaaaaccacgcatcggcattgtaatcacttgccaattgaatcgcaggtttagaaatatcaaacccgatataacgcgcggaaacttgcgcattgagctgttgcactggcgttccttcaccacaaccgacatcaaggactaaactatcgggggtaatccgtgatgcaatttcttttaagaacggttgaaagaaccctgcttgtaaaaaagcccggcgatgttgcaacatttccttggtatattcagacttcatttgctttgctaaaaaatataacgtgccatttttagcgaggtcaaaactatgcccattgacacaaagtaattggtgctcggctacacttgcaaatacgtcctgacagattggacattgtaatacggccaagttcgtcgttaaaaactgcttggctaactcaatttttttcaaatttctgattctccttgatttaacgtgctttcaaaagcatcccgttccggttagctacattagccaaacaatcggctacgccgcttattcgtctaattaggctaatcctcacaggataaccgcttttgacgcacttcttttcttaacgtactttcaaaccatccttttgcggttaactacgtccagcaaacgatcgacgctgtcgctcattcacgagactaggttaatcctcaaaggatacccggtttgaacgcacttcttttataccgcactttacattcttaaaatatccagtagacttaacagtaagttattgatgaaggaagtgacaccatgctcgaaacctatcgcttcgacagtgctaagaaaaagctcaccaaacatgctaaaatccagtccaacagttggattaacgtaactgatccctcgactgaagaaattgagcttctcactaagaagctccacatcccatctgattttatctactatagtttagatgctgatgaaagtgcgcgtgctgagcacgatcctgattataatgcgaccctgattattttcaacataccaattcttgaaaaagacccgcaaaaaccagataaatacctctataaaacaagtcccttaggaattattgtaacagattcgaccgtcttaaccatcaacaaaacgccagtcacctttttacagagctttgttgatggccaaattaaaggtttcaatccacaaaatcaccgtagaagtgtcctccagattctcttccgcatttcatccatctatctccaatatttgcgggacatcaaccgctctcgtgaacaaatcgaaactcgcttgcagagttccctacagaatgaagaactcttcgatctgatgaccattcaacgcggcttagtttatttcatgatgtccttaaagaccgataaaatggtactcgctagtttaatgcggaccaatatgttagatcttaatgaagatgaaattgaattgcttgatgatattcagattgaaaatcaacaagccatcgaaatggcagaaatttccaacacaattattaacgaaacagccgatacttactcgtcaattattaataataacatgaatagtgttatgaagttcttggcatcttattcaattattctcaccatccccggattagtatttagtttttacgggatgaacgtggaccttccactgtctcgctccaaaacaagttggttgattactttattcatttccctgatcatttctggtgtgctagtctatcgcttctggcgcaagcggtacattaaatagagcgtgtgccagctcctgcggattagaacccgtttaacttacaaaaggccactatcatcaaacacattctcccattctttgggttcgaatgtgttttttatttgactttcataaaaaagctcgttattatacgttatgcacggataaattccgtgttatccaaaataaatgttcgtttttaaggagaattcccaatggacgtatttgattacgaagatgttcaactgattcccaataaatgtattgtgaaaagtcggagcgagattgatactagcgtccgctttggctcagaaacgtttaaaatcccagtcgtccctgctaacatgcagacgattattgatgaaccgcttgccatctggcttgccgaaaaccattacttctacgtcatgcatcgatttcagcctgaaaagcgtcccgcattcatcaagatgatgcacgagcgcggcttatttgcctcaatcagtgtcggggttaaagacgatgaattcgactttattaatcaactcgcaaccgataacttactaccagaatacattacaatcgatatcgcccacggccactcacaagtcgtgatcgatatgattcaacatatcaaaaaagtactgcctaagagtttcgtcattgccggcaatgttggtacccctgaagccgttcgcgatttggaacgcgcaggtgcagacgcaaccaaagtcgggattggccctggtaaagtttgcatcaccaaaatcaagaccggctttgggactggtggttggcaactggcagccctcagatggtgcgcgaaagctgctaccaagccgattattgccgatgggggaattcgaaccaacggtgacatcgctaaatcaatccgttttggcgctagcatggtaatgattgggtccctctttgcaggacacgctgaatcacctggcaaattagtcgaagaagatggtcaacaattcaaagaatattttgggtcagcttcagaattccaaaaaggcacacaccaaaacgtcgagggcaaacggattttagtgccttataaaggtgcgattagtgacacgctcaccgaaatgcgccaagacttacaatcatcgatttcttatgctggtggtaaacgcttatcatcattgaagaaagtcgattacgttcttgttcgccattcaatttttaatggtgacatgctttaaaaagcagttaaaagagccagactaccttttaaatcggtagtttggctctttttagttaggtacctaaaacttctctgaaatggttgaatccgacttgaaacaactgtataattacccgtgtcgcttttaaccttagcgtctacattgatcagaaaagggtgtgaaacaaatggatattaaacatacacttggagataacagtgttatctttcgtgatgcaacatacattagaagaacggtgtttgtccgagaacaaaatatgccggaaacacaggaaatcgatgcgcacgaagatcacacgattcactatgtaggttacctcaatcaagacccagcagtaaccgcacgcgtgcacgtcttaaaagacggtggatttagaattcagcgcgttgctaccatcaaagctttccgtggccaaggactcggctatcaattaatcgaagccatcattgaagacgctaaacgcaccacaacgccttatattattttattcgcacaggaccacgccattggtttctacgaaaaattaggctttattgtcacaagcgaaggcgaaatggaagcgggcatcccccaccactacatgaaattaacgctctaaaaaccaaaaaacgcacgatccgcatttattacggatcgtgcgttttttattgctcgtataagcctgaaactgacttgaaccattcaaaaaggtgactaattaatatcttgataatcgcatatactggaataccgagaatcacaccggcaaggccgaataactttcctgaagccagcaacacaatgattgtcgtgaccggatacattgccatcttgctccccaagaccaatggggaaactaaacgaccttccaaggtctgttcaacagcaaacacgatgagtactttaatcaataataacggcgagataaacgctgcaataatcactgacgggaccatcgctaggaaagagcctaaatacggaattaagtttaaaatccccgctaaaattcccaacgtcaacccgtacttcatcccaacaatccagtagcctacagtaaacatgactgcaacccaaaacgctactgtcaattggccgcggatgtactgactgacctgtgtgttaatttcttccaacactttcccagttgtggcgcgtactttaaccgggaagaattttaacaaatagcctttcattcggtgaccatcttttaacatgaagaataaaatgaacggcatcgttacaatcgcgatgactacgttcgtcaccactccgaccgctgttccaatatgactaacggtcgaagtcagcattttatttactttacttgataaattactaaacacatccgtattgatatcgtttaattgtttttgaatcgatttgaaggctgggtcgttaaaccatttcatcgtctgagtttgaatattcgcccaataagacggccactgatcaattaaactcgttgtctgggattgaatgattggaataatcgtcgcaattccccagaccagtaagccaacaattaaaataaaaataatcgtaatcgacaatacccgatttaaatgccaacgccgttcaaaccaatcaattaacgggttggtcaagtaatacaagacggccgcaataataatcggtaacccgataatcaacatcaacgactgaattggttttaacagccaagcaagttttgttaataaaagtataatcagcaacgttaataacatgtttaacaaaacaatcggtagcttcttatttaaaaaccatttaaagaaccatgaacgttctgtttgtggctgtttattctctgtcacaccaattcacctaattcctacatagtttcttgatacgttatctgcgttcctactttgaattcaggaacagccggaacacccgcggcggctggtgttaaataaagcccactttgcagttgatcttcttgtggcgcaggtccaaaaactaaagcgacatgaccaatactgttgaggttaggatttaccaacgcgcccacatacgtaatcgtataaggttgttgattaataataaccgtagaatctgtcgtcagtgttagctgttttttggccgcttcgtccataaaatgttgaatcaatgccacgttttgaatggcagttgtcgcatgttcatcgaataaaatgaccatcggttcttgatcatcaatggcgtcgttgccaattgaaatgacttctgcttgcgtgttcataatgaaatctcctcttagttaagatagtatcattgtagcatattcgcgacttagttttagcgactagtgaatccttttagtaacaaattaaatcgttttcgcaggaatatgctatactcaaagagtatttgacgaagggagtctgattatgacagaagaagttttaattggtggttatacccgccggattggtaaagggatctaccgcggaattttcgatgcaacaactgcaaccgtgagtgacatccaaccattcattaatctcgataacgcatcctatttaacgatttcaaaccgcaacatcctctacaccgtcattaaagatggggaccaaggtgggattgctgcctatgacttagctagtggcacccctgtctttttgaacgcggtcttagcagccggcgcaccaccagcatacgtggcagtcgatgaagaccgccaactcgtttatgcagccaattaccataaaggcgaaatactcgtttatcaaatccaagccgatggcagtttaaccttagcgagcacgacagttcatgaaggccacggtccgcgtcctgaacaagctagcgcccacgtacattataccgacctaacacctgaccaccgcttagtggtctgtgatttgggcaccgatgaattagtaacttatgccgtcgacaatgctggtcaattaaccaaagtagcaatttacaagagtgaacctggttttggcacacggcatttagtcttccatcccaatcacaagacagcttacctattgggtgaattgtccagtgaagtgacggtcttagattatcatgcagccgatgggacttttagcgcggttgctacctactcaatgttacctgcagattggcatgaaacaaacggcggcgctgcaatccgtgtttccaaagacggtcgtttcctttatgcttccaaccgtgggtataattcaatcgttgtgtatgccatcagtgatgacagtcgccaactacgagcaatccaacaaatgtcaacggatggtgaattcccccgtgacttcaatctttccgctaacgacgattttctattagccgttaaccaaaatagtgataatggtacgctttatcggcgcgatgcccaaactggtttattaaccgcctgtcaaaaagacttagaaacacctgaaggcgtctgtgtcttattccattaaaataaaaaagattgaccgtattggtcaatcttttttatttacttcttttacgatccattaaattaataataattgcaatggcaattaacacaattgacgcaaaataaatgaagtgtaaaccattgtatagaatatggcgtaatgttggtaataattgtttaggtaagttcaaagcagtttctggattaatcaattcatttaacatgttttgatctaatcgaccatcaccagcaatcccttttgccaattgccgattcaaaataatcccataaactgaaaccatcaaggtttgacctaaagttcgacttaacgtattaaacgacgttgcaacaccaactttgtcagcaccagcaacgctttgtgccgtaacagtcgtcgtggtaatgattaagccaaagccaatccctaaaccagcagcaactaataagaagaaccaaaacggtgtggtttgtgggaccaatgctaagatgaagctcccaacaagtaaaatacacaaactaccggctagaattgttcgtggtgcgtgcttaacaagtaataggcctgcccataatgaggcaaaaatccacatcacagaactaggcgtcacaacaaagccccccatcgaggctttcaatccgaggatcccttgcatccacattggcatatagacttcaaaaccaattaagaaaccactcactaaagcagccactgcattttggacaacaaatgttcgatttttaaataatgataatgagataatcggatcttgtgcatgtttttcaacgcggataaagaggtaaaaagcaaccactgcaatcacgagcattgaccctaaaacgagcactgacggtttggcttcacccatgacttggaagccatatagtaaactcaaaagggccgccatcaaccataaactgccccaatagtcgactggttcagcactcgtcttcttctcttcttgaaggaagtaccagattaaaccaatcgtaataatcccaatcggtacattgatgaagaaaatccaatgccaggtcaacttatcaacaatgaagccccctaaaagcggcgcaatgatggaggcaatcccccatgctgacccattaaaacccaagactttcgcccgtttttcaatcggataaatatcagcaataatcgtaaatgataccggcataatcgccccggctcccaagccttgaattgcccgggaaataattaacgtccccatatgatttgacaatccacataaggatgatccgatgacaaacaaggccaaaccaaagatgaagattggtttacgcccaatccgatctgccatcttaccatagattggcgtcatcatcgcattcgttaataggtagattgaaaagacccagttcatcaatttcataccgtgtaaattactaatgatggttggcattgccgttgaaacaatcgtcccttcaatggctgtcatgaaagttgcgacgaaaatcgcaatcgtcacgagtaatacattcgtttttcttcccttactttgttccattcttagctccctctcttattcttgggtataaaaagagccttttcttaactcaaataagctaaggaaaggccgcctcttttactcgtctaataatacattaggcatttagtttagcaatacttgcctttaaggcatccactttatctaaacgttcccatggaaattcgacatctgtacgcccaaagtgcccatatgcagctgtttgcttgtatataggtctttgtagatctaacatttgaataatccctgctggtcgtaaatcaaagttttcacgaattgcagtttgaatcttttcttcactgacggtccctgtttcgaaagtatttattgaaacagaaacgggttgcgctacaccaattgcataggccaattgcacttcacacttgcgcgctaacccagccgctacaatgtttttagcaatgtaacgggctgcataacttgctgaacggtcaaccttagtagcatctttccctgagaaagcaccgccaccatgacgtgcataaccgccgtaagtatcaacaatgatcttacgaccagttaaacctgaatcgccttgtggtccaccgatgacaaaccgaccagttggattaatgaaatacttggtttgatcatccaagtatttggctggaataacggtttgaatcgcttgttcaagcatatccttttgaatggtttctaaagtcacatctgcatcgtgttgggtactgataacgacggtatcgacacgaacaggttgttcgttttcgtcgtattcaacagtgacttgcgccttagcatctggtcttagataagcgagttgcccgctctttcttaactcagcgactttgcgcattaaacggtgtgaaagggcaattggtaacggcattagttctggtgtctgatcgacagcaaacccaaacattaacccttgatcccccgcaccaatcttatcaagtggatcttcatcctttgcacgagattcaactgaatcgtcgaccccttgtgcaatatcaggtgattgttcatcaagtgcaacaatcacagcacagttatcgccatcaaagccataatgcccatcacgataaccaatccctttaatagtctctctgaccactttttggatatcaacgtatgccgttgttgaaatttcgccgacaactaggactaacccagttgtaacggttgtttcacaagcaactcgtgcttgtggatcttgtgctaacatcgcatctaagatggcatcactaatttgatccgcaatcttatctggatggccttcagaaacggattccgaagtaaataaatgtctttcttgcatttctatgtttccccctatatatgtgtcggttacaaggcctcttcacggtgtgtgaatcctatcgggaacttcttataactctactatcctagcacaaaatacaatccatttcaaaagccgttgaccttcttttcaaaaaaagttaagatgagacacatattctaagaaagaagtgttgctattgttctaccttaaccaacaacatctaaaggcttcaactcagccacaattactgactttgtttaattatttaaatctcggtttaatcgtcgggctgacaatgtggtcttttccaaagcaattcgggctttcattttatctaactgcgattctaggggcgctattagccattttactcgtcttatcaccccggtataaaccaaagcgaataattgcaactgctgcccttttagtcgcaattattctagccgcaatcatcggctggcgtgatctacctttgattgggcttctatcagggattactagcatttttgttctaatcccttttatctacccagaccagttcaaagaccgtacgttacggttatcatttcaattcttactagccccatttttctttttaattactcagattttcagtggcattcactttatccccgaggatttactcgtaaaattaggcctattcttaatcatcatttatcttctcgaactaacgactcacaatcggatgattactatcctcagttatgtagtatgggcgtgcattattattgcagtgattttaacgcatttaattcacggttggcatttaattctctttgcaggtggccagttattattaattgcgttacaactcggcctaatcaaacgtaactgctatttacaagagtttggatacttgctattaatcactggcgtctttaattaaaatgattaaacaacaaaaaagcgtaagcaataaattgcttacgctttttttaagacggtcacaacgggactcgaacccgtgatctcctgcgtgacaggcaggcgtcctaaccagctagaccatgcgaccgaatggaggttacagggctcgaacctgtgaccctctgcttgtaaggcagacgctctcccaactgagctaaacctccaaaaaaatgacccgtacgggatttgaacccatgataccgccgtgaaagggcggtgtcttaaccacttgaccaacgggccatgtcatttattatttaacggagagtgagggattcgaaccctcgaaacaggttagacccatttacatgatttccaatcatgctccttcggccgctcggacaactctccaaataatttttttattaagcggaagttggtgcaaccaaaaagcacgtttagatgttcaaaatagaacagcaaaaaagctgaggttgaagtatttcttcaacctcagcttttttatttttgtctagtccgatcaatttcagtccgaatggctttgaaactttgttctgtttgtgggccattattaacggcgaccatcataaacagactatcgacgatgctgatttgtgcaattaacgcgtgtagtgcttcggcgcggtaattggtttcttcggaaatggacaacagtgtcacatcacccaatttagcgagggttgaattgccaaaactggtgatgacaatcagtggaacgtgacgttcttttaagatgcgtgcaatttctaaagcatctttattttgaccactatgtgaaataatcagcgcacagtcttgttcggtgagttgggtggcctgcatcaattgtagatggtagtcttggctgtaaacagttggaatcgcagttcgtaaaaatttgtggtagccatcttgagcgacgattccagaagcgcccaagccaaataaacttaagcgcttggcctggttgatataatcaacggcttgccgtaattgcgcttcagtcagtagtgaacgagttgctttgagcgcattagtattggatgcgaaaattttatcggccatggtcagatagtcatcattattactaatttcatggaagagtggattatctgttggggttgcttgtttagcaagtaacgccattttgagtgcctggaagtttgcgaaggtcaacattttggcgaaacgggaaatagtggctgttgaaacaccacagtcagccgcaaattcttgaatcgttaaactttgattgaaatgttcagtttttaagatgtaatctgcgatttgtttgtatttttcacttaaattcgtgtagtacgcacggagtaaggaatcgatgttttgtgtcattgaagtgcccccctgttatcgatagtatagcataaaaaacaacaaagaaaattattttctcaaaaagggttgattaaagaaaataatttacatataatgaagacattaataaaagtgacatgaaattgtggataaggggactagcaaagatgaaattagcaatgattggtttaggcaaaatggggattaacttggtcgctaacttacgacgtaatgggcacgaggttgtcgcctttgacttaaatgaagcagcggttcaagaagcaacccgcttaggtgcattacctgcaaaggatattgatgatgtggtggcacaattgccacaacctaaaattgtgtggagcatgttacctgctggtaagccaacacaagccacaatcgaaacgttaagtaccaaattgacagccggtgacattgtcattgatggtggtaattcatttttcgaagattctaaacaacacaatgcattgcttgccgcaaaagggattcatttcttcgatgtcggaacttctggtgggatgagcggtgctaacgcagacggaaacttcatgatcggcggtgacagcgcggaagtcttcaaacagattgaaccgatttttaaagatattgctcaaaaagatggctatctctataccgggaaggctggtagtggtcattatctcaaaatggtgcataatggaattgaatacggcatgatgcaatctatcgctgaaggattcgatgtgttatcacatggtgagtttgaatatgataacgaagcggttgctaaggtttggagtaatggttctgtgattcgcggctggttgatggaattagcggaatctgcttttgcaaaagaccctaacttagaaggcttaaaaggtatcatgcactcatcaggtgaaggaaaatggacattagatgaagccttgaaattacaagtcccaacaccggtcattggtttatcattgatgatgcggtatcgttcacttgaagatgatacattcactggtaaagttgtcgctgctttacgaaatgaattcggcggccatgcagttgataagaaataagtggtatcctagtaagtagtcagtaaacaccacataaacgaggtaattatgatgaaatatatgattggtgcggatattggaacaacaagtacgaaagcggttttatatgatttaaaagggaatgttaaagcttacgcaaacgttggttatcctttatatcaaaccgtacccgatatggcagaagaagatccggatgaaatttttaatgcagtgtcagaagtattacgacaggtgatgcgcaagggcaacgttcaagccggcgaattacagggcgttagtttctcggctgcgatgcacagcttgattctgatggatgcaaatgatcaaccgctaactcgggcaattacttgggcggataatagagctgctaaagcaagtcaacaattgaaagaaaatgggttgggccaagccatttatcaacacactggcacaccaatccatccgatggcgccactttcaaaactgatttggctgaaagaagcgcaacctgaattgttcaaccaagctagtcaattcatcgatattaaaacgtatgtcttccaaaaacttttccatacgtatcaaatggattattcaatcgcttcagcaaccggcttgttcaacatttttaatttagattgggatcaacaagcccttgaagtggctggtgtcacacgccaacaactacctgaattagtcgaaccaacggattatgttaaagggattgatccgatctatggtgaattaaccggcattggtgctgaagtaccatttatctttggcgccagcgatggggttttatcaaaccttggggtaaatgcaattgatccaggcgtagtcgccgttactatcgggacaagcggtgccgtgcgagtggttgttgatcatccagtggttgatccaaacggtaaattattctgttacgccttaaccaaggataaatgggtggtcggtggaccagtcaataacgggggaattgtcttccgttgggtgcgcgatcaactttttgcacctgaaaaaatcaaggctgaacaaatgcatgtttcaacatacgatattttgacacaaattgcggcagaaattccggctggttcagatggactcttattccatccttacttgggtggcgaacgggcaccaatctgggatgcagatgcacgtggatcatacttcggtttgacgcggcaacatacgcgggcgcacatggtgcgtgcagcgcttgaaggcatcgtttataacttatacatggtgatgctgatgattgaaggtgtggcaggtaaaccaaagagtattcaggcaacgggtggcttctcccgttcagaattatggcgcccaatgttggcggatgtctttgaacaagacgtcacgattccagagagtttcgaaagctcatgtttaggtgctgctgtcttagggatgtatagtttaggcttagtggatgatctatcagctgtcaaagaaatggttggtgtgacgaatgtgcatcatccagaagaagccaactttgaagtttatcgcgaactattaccaatctggattcgattaacacgggaattaaatacggaatacggcgcaattgctgacttccaacgcaaacatatgcaagttaaagagtaacgaagtgaactgggtctgaaagcccagttacttttaacaatatcatgatagcgcaaacattattgaaaatagggaaaattatggcattagtagtcctattattgggcattatcttattactcgcccttattattcgatttaagatcaatacgtttatcgctttagttataacggcaatggccgttggggttggcctaggtatgccattaacggacattgcaaccagtgttcaaaacgggattggcggtcaacttggtgagctctcaattgtctttggctttggtgccatgatggggcggttagttgccgacgctggtggcgcgtttagaatcgcgcataccttaatcgatatgttcggtaaaaaagacttcaaattgcaattatgttggcttcgttcatcattgggattgccttattctttgaagttgggatggtcttgttagtaccaatcgttttcgcgattgcaatcgaagtaagtgtgtcaattttgtaccttggaattccgatggctgcagcactttctgtcacacatgggttcttgccaccccatccagcaccaacagcaattacctcagctttaggggcaaatgctggtcacgtattgttatatggggtcttaattgcgatcccttcagtgattattgccggtccattattcactaagattgcaaaacgcctagtaccagatgcgttcgcgcgccaaggtaatctgacggcacttgggcctcagaaaacctttaaattagacgaaacaccggggtttggaattagtgtcataacctcattattcccagtcattttgatggctgtcaccacgatttatcaaatggcctttaacggcgggaaattacctaaaaatccaacgatgctggattcaatcgtcggttttatcgggacaccagccattgcaatgaccatttcattgatggttgcgatgtatacgatgggttgggcgcgtcggattaaaaccctagcgattatgaagacgattgaagaagccgttaaatcaatcgcgatgtcactcctagtcattggtgggggtggtgcgtttaaacaaatcctcatcgacggtggggttggcgatagtgtcactaaattattcgcaaatgccaatttatcaccactattattaggttggttaatcgcagttgtcttacgggtggcattgggttcagcaactgttgcgtcattgacggcggcaggcttggtcttaccactaatgcaatcagccggtgtgaaccctgcactgatggtcctttcaattggagccggcagtttagcggcttcccacgtgaatgatgccgggttctggatgttcaaggaatactttgatttaagtgtcaaagaaacccttgcaacttggacagttttggaaacattgatttcgattgttgggttaattggcgttttactattaagtttagtcgtctaaataaaagttaaatgacgttggctgttaaagacagtcaacgtcatttttaatagcacttaaggtgggcaattatttgtaatcggttacctaaaaaaacgctgagaaacagcttttttttaatcttgttcagggacaacatcaaagagatatgatagaatgggtaaggattaatttgaacactggagacgatcagagttaggtcatcctaaaatcaaagtcattgaatcctaatagttgaacgactcaatcgaagagaaagaggtacttatatggataagaagcagcgagaagattcacaaaagggtgaacttaatcaacaaaagcatgagaaattcatacactatgctgatggcacgagtcttgaagaaattaataacacggttgcgattcccaagaacgctggtttttggcggacgttgatggcctttatgggacctggtgcgttagtggccgttggttatatggatccagggaactggatcacgtcaatcgccggtggtgcgcaatacgcatacaccttgatcagtgtgatcctagtatcaaacttaattgcgatgttattacaagcaatggcagcgcgtttaggaattgtgaccggaatggatttagcgcagatgacgcgggccaaaaccggtaaaaagatggggattttcctctggattgtcaccgaattagcaattatggcgaccgacatcgccgaaattattggttccgcaattgcgttagaactgattttcaacatcccattgctctggggtgtcttaattaccgcatttgacgtcttgctattattactattaatgaaacttggtttccggaagatcgaagcgattgtcgcaaccttggtggccgttattttattcgttttcttatacgaagtgattctagcgcaaccaaatatgggcgacgtaatgcgcggatttgtaccaagtacacggattgttaccaaccagaagatgctattcttggcattagggattgtcggggcaactgttatgccgcataatctctacttgcattcgtcaatcgcacaagcacgtcaatatgaccgtgacgattacgccgaaaagaagaaagcaatcaagtttacagtcattgattcaaacattcaattatcagtcgcatttatcgttaactgtttactcttagttttaggggcagcaatgttctttggaactaacagtgatttaggacgattcgttgacttattcaatgctttacaaaacaaagaaattgttgggagcattgctagcccaatgttgagtttactctttgccgttgctttattagcttctggtcaaaattcaaccatcacagggacactttcaggacaaatcgtcatggaaggtttcgttcgcatgaagattccattgtgggcacgacgggtgattacccgtgggttatcaatcttacctgttattattttcacggtttactaccatgggaacgaagcacaagttgaaaacctcttgatttactcacaagtcttcttgagtgttgcattgccagtctcgatgattccattgacaatgttcacgagtgatgaaaaaatcatgggcccattcgttaaccgcccttgggtgaaatatacggcatggtttgtcacaattgtgttgacgcttttaaatatctatttgattctacaaacaatcggcctagttggctaatgaataggtgctcgttaatccgtaaattgatatggattgacgagcgctttttttgttcggtatgctagactagagataaggtattattttggagggattttattgtttgaagtaacgagtgtgcatatcattattcgactgctactggcaaccttaattgctgggattatcggatctgatcgggaatataagaaccgcccagccggaatgcggacacacattctggtctgcattggtgcgtgtgtgattgcgatgattcagcaggaaatcgcagcgcaaaacgttcaatttgcattagcgcatagtgcgattagtaccactattcgttctgatcaagcgcggctgattgcacaagttgtcagtgggattggttttttaggagctggaacgattattgtcacccgccacaagattcaaggattgacgacggcggcctcactttgggctactgcgggattaggacttgcaattgggatgggctactatcaaattgcggtgatcagtgcggtctttgtcattttcgtgattgtcttcttgaaaaagattattcacatcaatacgttgaaaaaaatcgaaattaagtataagcataaattggaaaccaaggagtttattcagagctattttgaacaacatcagattcaaattcgcgatgtgaacttctcagtaacgcaaaacgaacgtgatacgatttacactaacgtctatcgcatcgaaattccccgggaaatgcaatatgcagaaattgtggaagatatctcgatgaataagaacatcatgacgattcgaatggtcagtgtctaaaagagtgcgcaagcaggcgtttatatttcgagtattaactggatttgtctgcaatcgccgatgcgacaagtttggttaagcacaggaatatgcctgctggagcacgtttaaaaaaagtgtgctgtctcaatcgggaaatacatttacgaaaaaagaagccccctgataaaaaagtttatcagggggcttctttttatttcagtctaattaaacgcaatttgtctgtctcttggtaagattaagttgagaataattgcggcaagcgcacaaatcgaaattggtgattcaagtaagtattggatcatttgaggcgttgctttcaccaatgattgtggcatgatgatgatggcgatacatagaatgattggaattccgatgatgtacatatcacgttcttgggtgtgtagtgtgcgaataacatttaacccgttgagcatgatagttgaacaaatgatggcgaaaatcccaccaataactggggctggaatcgctgataagaaggccgctaatttattaaagaagccgaagatgataaaccaaatcccggcagaaacgaatacttttttactagcaacaccggtgattgaaataatgccggcgttagttgcataccctgtaactggtgagccgcctaagagtgcagcgattaaacagctaattccttcaccgataatcccgtgattccattgtttcttactgatgggcgaatccgtaacggcactcattgcaaaccaagtcccggtcgtttcggtcattaaaacggcgtagataatgacgaaggtcatgattgctgtcatcgaaaagtgcataccatagtggaatgcggtgaaacttggcaagctaaaccaactcgcttcgttcacactttgccagtcaaatttaccaagcatggttgctaaaacagttccgcctaataaggcgatgatgatggaactaactttgaagagtttttgtaatttagggaagtagatacctagcgaaacacaaagaattagaatggcgacggtcacaacagccaggagtaagttctcattgatattgccctgtgctttgaaaatgttatcacctaaagcagatggcatcagtgaaagaccaacgatggtgatgattgtgccaccgacgacttgggggactaagctgttaataattttttggaagaggccggtgacgccgagaagaattaacagaattgaaccgacaattgaagcgccaatcaccgttgccatcccgccgtctttagcaccactagcaaagtaaatcccggcgattgccccaattggaacaaatgaagggccttgggaaacaggcattttcataaaaaatttggtttgaagaatcgtaccaatcccggcagcaaggaatgtcgcttgaattaagccggcttttgcatcaagacccatcgccaataaaccggcaatgataacggggggaacgtagacatccattgctaaaacgtgttgtagtcctaagaagccagcttcttgattcgaaatcggctcgtcaggaccgaccattaatttttgagattgttcattcataccagttgtgctccttttcgtggaccagtttaccttgaacgtagacggccttaatttggtgtttggtgtggcggaataaaagttgttcgagttgttcatctggtgtaagacttgcaaagcgtggtggcgcttgaacgatttggaaatcagcaagcaatcccgattcaatggcaccagcttgaatgccaagactagttgcaccaccgacggttgccatataaaaagcttgtttagcactgatccgactgttcgcaacaccgcgttggtcagccgcaatggtggcgtcaaccccgtcttgtcgaatttgggaggccgttacggcttgttgcaaattggcatataagctaggggtataaccaccggcgatatcactgccaagcccaattttaatgccttgattaagtaactcgtgtgcggggagaatcccgttaccaaaataggcatttgagatagggcagtgcgcaatcgctgcttgttcggttttaatgatactttggtcagtagttgtcagttgtgttgcatgtgctaataccgaatgttgattcaataatccgaatgattgcaacatctcagagtctgtatggccgtaacgttcgcgtacataatcgtgttcccagtcgctttcgctgcagtgtgtctgaacggtgatgtgttgggactgtgcaagttgaccgagttgctgaagtgtttcagttgtgcaactagggatgaagcggggggtaatgacgggttgaatgaacccattacgataggtatcttgaattgcttgaacaaaagtttgtgttttattaatggcttcttcaggagaagcatcacgataatagtctggtgtttgatctggattatccatcgcaacagttccgatgaaagcccgttgccctgcttgggaacaaatttctgcgagtcgtagattcgcagaattgtgaattgttccgaaatatagggcggttgttgtgccgttagcgagcatttcggtcactaagtcttgatacacaggtgtggcgaaatctaaatcggcgtagcgcgcttcaagaggaaaggtataatgattgagccaatcagctaaagggcgatcaagggcaattccagcttgtggccattgtggcgcatgattgtgtagatcgataaagcctggtaacaagaagtgtccgggagcgagtgtgattaagtggtcatgttggcgcgcagctgataatcgctcagagtattctgacgccgtttgatgaataatgtttgtgatttgaccattatcactgatttctatcagtgaatattcgtgaaatgaactataatttggtgaatttgcagaaaaataacttgcttttagtgtgattggcaaacttttaaacctctccttctagatggtgtgttgtaagtatatcacataccataatgcttttaaactttaaaatcgttcgccttttgattcatttctaagggatgctttcagaaaacgacacgtgagcaaaaaggtaccctaaaaaatagcagactgctagaatgaacttaaataagctagttgaaaggatgaatcacatgagtttagcagatgaatttgtagaacggcgttttattgtctttcaatgctataagtgccaacatccagcgatggaaatcacgacgaagacagcactagaagataattcagatggctctaccaagtttcaaattgaaacaacttgcccacggtgtcaagcaaccgatcaatttgttatcaataacggtcaagaaggggaaattagcgcgagtgtcaatagtggcaaagtcgctaaggttgccaacattaaataaggcaatcgacgttcgctaaaagtgaacgtctttttttgtggcgtaaattgtatataattatgaatacatgaataaaaaggctggaaacggttgatttattcaaatataattgacattatgccctttgaattgtatatttattctacttaatacaattataaaggacttattgaaatggcgaaatcaaaaaaaattaacgttcaaggtctcgtattgatgatttttgggtcaatcttcggctttgcgaataccacaattgctttctacttaatgggctatgccagcattatttggtatatcttagcggcaattttctttttcttaccaacttcattaatgtttgctgaatttggttcttctttgaaagaatcacgcgggggcatctattcttggttagaagcatccattggtaaaaaggcggctttcatcgggacgttcatctggttagcgtcatggattgtctggatggtgtcaacagctgctaaagtgtgggtgccgttttcaacgttcctccaaggttcagatcaaacagcaacctggcatttattagggatgaatggcactcaagtggtcggtgtcttaggaattctttggattttattattaactttcctatcaagtcgtgggattgataagattcaaaagtttgcgtcattcagtgggatggccgttgcctttttattcgccgcattcttagtgattagtgtggcgatttggtttaaaacgggttttcatttggcagaaccgattcatgggacgacgacctttgttaagagtccgatgagtagctatcaaacaccaattgggatgttatcatttgttgtcttctcaatctttgcttacgcggggatggaagccatgggcggtgttaccgatagtatggatcagcctgaaaagactttccctaaagggttaatgattgcgacagtcttcattacattaatctacgcggttgcaatctttatgtggggcatctcaacgaactggcaacaagtcttgagcgggaataaagctaacatgggcaatattacttatgttcttatgcaaaacttgggttatcaattcggccatgcctttgggatgacgacacccgttgcgatgacgattggaacaacctttgctcggattaccggtttaatcatgtttatcagttacttaggcgcatttgccgtcttgatttattcaccattaaagtcatttgtactcgggacacctaaagcactctggccgaacggctttgcagaagttaacaagcatggcatgcctgaaaaagcaatgtgggcgcaagcattattagtctgcattttaatcgcggttatttcatttggtggtaaagctgccggtgacttctataatgtcttgactttgatgtctaacgtttcaacatcgttgccatacctctttttagtgactgcctttccatatttcaaggcacgcaaagatttggaacggccttacgaattctttaaatcaccagttgctgttaaggcggtgacgattgtggtcgacttagtccttgtcttcggaattgcctttacgattattcaaccgatgttagaaggtcaatatttagatgccttctggatggtcattggtccgattgtctttacgattatggcccttgctttgtatcatcgctatcaacgaaaagcagtacatggctaaattttttaaaagcgttgaccgatttggtcaacgctttttttgatggcctaattaagggcttgtgaattttaaaagggattaattctcatttaattttaatgtacaaaggaaaatagttgcattttcagattggttccgttttagaactaatctgatttttaaagactaacataaagccccatctagcgattttttaatttttaaagaaagttggttacctaactatcacattagaataaaatgagaataaaagtggacggtgtgcaactttcacaataaacctgtatactttttagatatagttttcagaaaatgaaatcaaagggggattctatgactgtcaaattacaagtcaaaaatctaacaaaaatatttggtaagcgcgtgccgcgtgccaaagaattactgaaacaaggaaaatcaaaagcagcgattctaaaggaaacaggtgcgacaatcggtgtcgaccgggctaacttcgaagtagaatctggcgagatttttgtcattatgggactatctgggagtggtaaatcaacattggttcggatgatcaaccggttgattgagcctactgaaggtagtgtattaatcgatggcgaggatttaatgcagattgataagaaggcattacgtgaagtccggcgtaaaaagatgagcatggtattccaaaattttgggctctttccaaatcgaacgattcttgaaaatacagactatgggcttgaaattcaaggcattgataaggcgacacgggaacaaaaagcgaatgaagcactcgatttagttggtttaaatggttatggcgatcagtatccgacacaattatctggtgggatgcaacaacgggttggtttagcgcgtgcattagcgaatgatgctgagattttattaatggacgaagctttttctgcgcttgatccattgaatcgttctgacatgcaagaccaactactcgacttgcaagaaacgatgcacaaaacaattatctttattagtcatgatttaaatgaagcgctcaaaatcggcgaccacatcatgatcatgaaggatggggaaatcgttcaaaccgggacaccggaagatatcttgacacggcctgctgacgagtatgtagagaaattcatcgaaaacgttgatcgtagtaaagtttacacggccggcaacgttatgattcgcccaacgactgttaatattgaaaaagatggccctcgtttggccttaaaacgaatgcgtgaaaatgaagtttctaatgcttacgttgtcaacagtaaacgtgagttagttgggattattgatgcgcgtgatgtacttgagttagtccgcaaagaaagtcgtgatttgcaatcaatcgtgaatactgaagttccaacaaccgatgaagagacaccaattgctgatatcttagatgatatttcgcaaacgggcattccgtttgctgtcttaaatgataagcaacaattacgtgggattattattcgcggggccgtcttaggggcacttgcaggaaacgaggtgaaccattttgcttaatttaatgacgattgctaaattaccaattgccaattggatggatcactttgtcgattggctgacacaatttactggcttttttaatggtttaacgaattttattggcggaattatcaacgctttccaatgggtgtttgatttaatccccatctggttattcatcgtgattatcgctggcgtcacttatttagcgaatcgcgacaccaaaaaatggggtttaattatctttgaagtcctcggcctactcttgatttggaaccttgatttctggcgggatatgacgcaaacgttaacgttagtgttaacctcgagtctgatttccctcgtaattggggtgccacttggaatttggatggccaaaagcgatattgcccaggcaatatttaaacccatcttagatttcatgcagacaatgccggcatttgtttacttaattccagccgttgccttctttggtatcgggatggtcccgggcgttttcgcatcagtgatttttgccatgccaccaacggttcgtatgacaaaccttgggattcgccaagtgccaaccgaattgatcgaagcctctgattcatatggctcaactgaatggcaaaagttaattaaggttcaattaccattggcgaaatcgaccttaatggctggggttaaccaaagtatgatgttggccttatcaatggtcgtgattgcgtcaatgattggagcaatgggcttaggaacacgagtttactttgctgttggccggaacgatgctgggggcggttttgcagccggcttggcaatcgtaatcttagcgattattattgatcgtttaacccaagctttgaaccggcaacgtaaacattaaggagggattcagtgattaagaagaataaattaatagcttttttcaccttagtggggctcgtcacacttctaacggcctgcagttcgcaaactaagccgtacgctaccgatgagaaattaggcggtcaaattaattacacgattaccggaattgacgcgggtgctgggattatggcatccacacaaactgcaattaacaagtatcatttgaatgatcagaactggcagttgcaaaccagctcaactgcggcaatgaccagtacgttagacaaagcgattgcggataaacgcccaatcgtcattactggttggcaaccacattggatgtttactaaatatccaatcaagtttttaaaagaccccaaaaatgtttttggtcaagctgaacacattaatacggttgttcgtaaggggctaaagaaggatatgccagaagcatataccatcttagatcgattccattggacgccaaaggaaatgtcgaccgtaatgcttaaagtcaatgacggtgttgaacctgaaaaggcggcgcgcgattggattcaagacaatccagaaaaagttgctgagtggactaagggtgttaaaaaggttcatggcacgaaaattaagttaacctatgtggcttgggattcagaaatcgcgtcaactaacgtggtggctgaagttttacgtcaacaaggttatcaaccaacgattcaagctatggaaattcaaccgatgtgggcgtcagtcgcaactaaagcagccgatgcacaagtttccgcatggttaccgaagacctctggtttatactacaaggattacaaaggtcagattgaagacttaggtccgaacttagagggtgctaaggtcggtttagctgtaccgaagtatatgacgaatattaattcgattgaagatttgaaaacaaaatagaatcaaacagcgtatgcgatctgttcagatagaacatggttagatgatcaaatttcggctgttgaaagagtcggttagggcaaaagttacttttgttccaaccgactctttttttatttgttagacattctctgttagaataggactattgaatgttatcggaggcggaatagatgtctgttaaggcgtttttagattttatcgaattacgcactaaagttggtagcgtgattccctttatggctgggttcttttttacgttgtattatttccaccaaattgatccgatcaataccgtgttgtacttctgtgcattggtgttaattgatgtcttcacaacgggatggaataattacaacgactttcacctcgctaaaaatgaaacgctccagcaatcaaccagtgcattaggacgacaagatattgcccctaaggttgctttacgctggttgatcggctttataagtacggcaaccgttctggggctgattctggtctggcgcacaaatttaattgtgttagccatcagtgttctgttcatcttaatcgggattttatatacttacggcccattcccaatttcacgattaccactgggtgagttgttatcgagtctggtattagggttcggtaatttctttttgacggtgtatgtcaacgttccggcggatcagttggtcgatttgcgctttgatgggccgttaatgttattccaactgaattggctgaatgtgattttggtgtttgtggcgagtttaccaactgtcttcctgattgctaatttgatgttaatgaacaatatttgtgattacacagtcgatttagagaatgggcggcacacattaatcagttacattggtcaaaagcgcggcattcaactttatcaacttagtgcgtatagttgttacgtggtgattattgttgggattggcctgaaattatatccatggccagcagcgctagcttttgcgagtggcccaactttgttacgtaatgggtttgcattacagaagagtcaggaaaaacgcgttgtatttggtacagcggttcagaatctaattgtctttaacggtttttggctagtgggaatgttgattggcctctatctttaaatgaaaagtcactgcggtggcttttttatttcaaaaaaagtattgattgtatatacaattttgattataccgtgattattaaaacgcttacatgtggagatgagagttatgacatatgcaatgattgggacttggcgaatggcctttgaagggattcaaaaagcgatggctgatttaaaaaatggtgggcaaagtacggatgcaattaaaaccgctatcaaaaaagtggaagattaccccttctttaaatcggtcagttacggtggtttgccaaatgcgcaaggcttagtggagatggatgcggcattcatggatggcaacacttttgcaattggtgctgttgcaggaattagtgatgtgaagaacccaatctcagttgcgcgtcaattaagtgacgatcattttaatagtttcttggttggtgcgggagcgtcacaatatgcgatgtttaacggttttgaaagccgtaatatgttgaccgaacgcgcacacaaaatctggatgcaacgaattaaagaaattaacgaaaaaaatcttagcccatatgatggtcacgatacagttggcatggttagtttggatcaagctgccggtatggcagcggggacgtcaacttctggattatttatgaaaaaaccagggcggactggtgattctgcattatctggcagtggcttttacgtggatagcgaaatcggtggcgcaaccgctactgggttaggcgaagatttaatgaagggctgtctttcatatgagattgtgcgcctgatggggaccggtttatcaccacaagcagcgtgtgatcaagcagtctatccgtttgttgagaaattaaaaaaacgctacggcaaagctggcgagttttcgttggttgccttaaataatcaaggtgaatggggcgtggcgacgaacgttgagtttacgtttgcagctggcaatcaagatgcggcaccacaaatttttatggctaatccagggccaagtcaaacgatggtgatcgaacccatttcagcagaatggcttgaagcctacgcgaaacggattaaagcaccagttgaatagaggaagtggttggaatggttaagtatctatacgttgaaattgcagaagccttacgagatgacattcaaaaaggggtctatgggatccatcagaaattaccatcggaaacggatttagccaatcaattttcaacgacgcggctaacaattcgcaaagcaatcgatctattggttaaacaacatgtcgtggtacgcgatcgaaatcgtggcacctatgtacttgcaacacaaagtaaaatttcgagtggttcatctggtttagttggttttaccgaagcagccaaacagtttcaattggatgtcagcacgcgggtgttagatttacgccggacaatcgtttatccggactatgtggcctccaagttagatttagcaccacaggagccagtttggcagattgaacgcttgcgaatggcagacggtgaagcgatgacccacgaacaaatctatctgaaacaaaaaattctaccagaattaacggcccatgaggcacaagggtcactctaccgcttgattgagcaaacaatcccaatcgggtatgccaatcaagaactcgaagcagtcgtattggaaaaaggcttaagtgacttacttgagacctctccagggcaacccgcttttctagcccacacggttgcgtattcaatggacggttatccaattctttatgataactcgcattatcgtgctgataaatacacgttccataacatcttgcaacgtgaacattaaaaggagggttttaaatgaaagtaattgtcttgttggatcaaatccaagctggattaggtggtaaggaaaaaggggatacccctttaggtggaaaaaaattagcgatgggtgctgcggatacgctcgataaggcattaaaaaaaatggactctgaaattatcgggaccttttattgcggaactgattattatcaggcgaacaaagccgaagtgaatcggaaagttgcgaagatgagtgagaaaatgggtgcagacgttgtgattgcgggaccgacctatgattatcgggacttttcgacgatggcgtgtgaattagcagccactattcaaaaagaaacaacaattccggttgttgggctgaccgcgatcgaaaagaatgccgatttaattcaacagtatcaaggtcaaataacgattgtgaagatgccaaaaaagggtggtactggtctttcggattcaatcgaccacgcattgcagttatgcaaaatgaaggttaaaggcgctgattttactgattttattaaccaatattgttattaaaaggaggcaaaaccgatgcaaaagaaactcgaacagattttgatgccggttgcgattaaactggggaataatgttgtactccgatcattgcgagatggtttcttaatcattacgccattgattatcgtgacatcgattttcttactgattgggaattttccaattcctggttggactgaattttggagtgggattttagggccgcactggacagaatggtttagtgctgtttctaatttagtgtttagttttacagggttgcttgcttgttttgggatatcctatgcctatggtaaaaaccgagggttacaagcgattcataccagtgcaattgctattatttcattcttaattttgacaccgactgttgtcaccgttggtaaaaaatcaatcggtgccattcaaacaatgtatttgggacctaacgggattttcctagggatttttatcgcattagtcagtgttgaaatttaccgttttgcgattaaacgcaactggcgaattaagatgccagatggtgtgccacctgcagttagtgaatcattcgatgccttactaccggctggcttagtggtattagttttcttcttaattcgaattggttttagcctttcgagtttcgaaacggcctacaatttcatctacacgttactgcaacaaccgttaaaaggtgccggcaactcattgccatctgtattgctttataacttcatcgcaatgttgctctggtgttttgggattaatggtccaactatcaccaacagtgtgtggtcaccaattttcttcgttctgacgcaagataacttaacagcattccagaatcatacgcagttaccacatattttcacccaacaatttattgacatcttcaccacatacggtggcggtgggagtaccccctcactcttaatcgtcatgttaatcgtctgcaagtcaaaacgcgtcaaagaattgggtaagttggcaattgtccccggtattttcgggattaacgaaccgattatcttcggtttgccagtcgttttaaacccaattattgcaattccattcattatcgtaccggttttaaatacattgatttcagggattgtattccaactcggatgggtaccgtatacaaatggcgttatgttgccatggacaacaccaccgattatttctgggtggctttcaactgggagttggacagggtcagtcctccaattatttgaattagtgcttggaattttaatttactatccatttatcatgatgattgatcggcagtatttggcggaagaagccgaagcggctggcttagacgatgttgatattaattttgacgaaatttaatagaaagaagccattcttgtgaaaccgattagagcagattttaaggcattatttgaagcacatgctgatgagttcttagcggacttgcgggaagtgttacgcgtgccgagtgtgtgtggagcgcaaacgtttgaagcgccgtttggaattggtccgaaacgcgcattggaaacagtgttggcgattgctgatcgaatgggctttaggacggggcaagtcggcaattgtgttggctgggcagaatatggaccagacgaaacgcaagcgccaacttattttgggattcttggtcatttagatgtcgtggatgttgaagatgattggcattatccaccatttgaactgactcaggtagataatatgctgtatgggcgtggtgttttggataataagggaccacttttatcgacattatttgccctgtatctgattaagacgcaaaagataacatttaaacaacgcgtccgaattatttttggcactgatgaggaatctgggagtcaggatatgccaatttatttggcggaacattccgcaccatatgccggattcacaccagattgtaaatttccagccgtctacggcgaacggggcttgttagatgtccagttagcgttaccgattacggacggctctgagcaacaaattacggcgattgaaggacggttcgctaaaagttatctgccagatcatgcacagctgattttggccgatggcacggttaaaacttatcacggcaaaaaggcacctagcaatgcccccgaaatggcggataatgtgttaccgaagttagttgccgatgcaagtcaactcactggtcaaacgggtcaattttatcaatgggtagccgctaaaatcgggacgcagtcaactggggaaaactttgggattaattatcaagatgaagcatcaggagcattgcaacttgctttttatggggtatcgattgaagcccaacagttaagtgtgcatctgacatgtcgttacccaatcccagtgacggaagatcagttgttaactgggattaaagctgccatgttgccggggatgacgttgacggttaaacggcgttatccatcgcaagttactgatccaacattgccatttattcaacaaccctctgcgatttatgcggcagatactggtttggatggcacaccggtcacaacaacgtgcgtgacttatgcgcgcgcgttaccgaacatcatcgcgtttggcccatcatttccaggtcaaaaagggattgcccataaaggggatgaatggcttcaattcagtgactggcaaatgatgatgcagatttattatgatagcttgctcgcagtcggtactggaacataaaaaagcgtgtgccataagtcgggataccctgaggattagccggaaggggatgacttataagaacacgtttagacgattaaagttctaatatcaaaaaaggggctgagacaaaatttacttttgtctcagccccttttactgtttagcgacttgctaatgcgcccattggatcccatggtgcgagaacggttgggtgatcgtattcttctgtttcaatgcgtttcatttcatccgttaagaagcgtttgttgatcacgatttgataaacaaattcgtcaaaccaactatcactcatgacgaagtaacctttcgtcccaactttgtcaccccatgagttttcaaccttccatttggttggttgaccatcgacgaggtcgacaccggtgatgaccatcgcatgggtcatgagactttcaccgtaatcaaggcgttcgcctttagaaattgaaagatccatgccgagcatggcatctttttgataaacttcagtgtccatgatgccgagtttgcgatcagatgattggcctacatcgctaccgaaccaaacggattcacctgcttgtagttgtttaatcgcgagttgtttgaaggtgtcgatgtcgaggtttaaatgccgcacttcacggccaccgaccacattgcccaacatttcaacgctgtataagtggttgtatggtttgtcggcagttggtgagttaatcaatgaaacgtaattttcgaggtcccagccaacgtatttttgatagaacgtttgcggtgtgaggcctttttcgatgtgatagttgtgatcatcatcgcggtattcaaagtcgaattcaacgggtggttcgcccaatgcataaacgagcatccggtaaacttcggttaacatcgcgtcttttttagcttggatgtcggcttcgctaacaccgtcggctactaattggcgtaatgtaacggcatctttacggagtttaaggttcaaaacgccgttgagttcgcttgatttttcactattatatgtttcgggcatgactgacttaggtacaatcccgtatttttcgatgagtgcgcagagcatgtcccattggccgccatcttgttggggcgttgtcattaagaagtcgactttgcggtcgccaattggttggctggcagtcttcaagacgttttcgtagaagtagtttgatttttcgaatttgtcccagaagttggtgtagttttgggacaattcgaaatccttaattttgaattggtcttggaggctgtggcgcattgtatttaacgcggcgaacatccagcaacgaccagattgcttttgattggaaacggcaccggtatctaagtcaattgaaaaaacgggggccattttggcttttgaatcggtattagcactcgtggctaaaaagccgttgttcataatggcatttttaattgtgttggattgtggtgttgccttgaaatcggctttgaattgttgaatatcttttgctgtaatgggttgaaccatgtggaaaacctcctctaaaatttggtgggttaaattaaattacccggtttgaatggcattatttttttgaaacgtgctttcatcaacaacttcttccgccttacctcacttgccaaatcggcgactgcattgccaattcgtcaagtgctgtaagtgctcagaagtaacccgttgatggcgcactctgatttgaaacgtgctccgtaagccatatccttccggttaaccctgaacgtcaaacgattgctggcgcaatccttcgccgttctgtgttaatcctcaggataaactcggcttactacgcactctattgcagtgcgtcccatgggtctagcttaattggggtttttgtgagtgcggcttgttcttcttttgtaaggtacgcttttttgacaattacctcgtaaacgtagtcgtcaaaccaagcgtcgctcatactgaagtaaccttttgtaccgactttggcactccatgtgttttcgactttccatttcgttggttggtcgtttacgaggtcgacaccggtgagggtcatcgcgtgggaaacaacgccttgtcggtagtcaagtcgttggtcttttggcatcgtcaaatcgaaaccaaagagtccagaatagtcgtaaaggttgcgatcaagccagcctttttgtcggtccatatccgcgagcacgtcattgccaaaccaaattgtttcaccgttttgtaaggattggatagccagtgcttttaaacgttcagggggtaagtttaagaggcgcattgggtgaccttcgactaccgtgttttgcgattctaaactgtagagttggttgtattgtttacttgtttgggggctgctgacaacggtgatgtagtcgtcaaagttgcgattgagatatttttgatagaaactttgcggggttaaaccgcggtcttcatggtaattttggtcgtcatcgcgataggtgaagtcaaacgtttcgactggttcgccgaatgcgtaaacacatagccgatagatttcacttaagaaaccagtccgcgtttcactgatggttgtttcgctagcgttgtcagcaacaagttgccgtaattgaatcgcatctttgcgcagtttcaaattaagagtgctgttgaattcagtggttaagtcactgttataagtttcgggcatgaccgacttgggcacagcaccgtatttttgaatcagtgccactgcgttgtcccattggccaccgtcaaaatcgggaccagcgagggtgaaggcgacttcgcgatccgtaatcggcttgtcggcagttgctaaaatcttttcataaaagaggttcgccttttcgatgcgatcccagaaagatagataattttgggagagttcgaaattcttaacgtgatatttctgttcgaaatcgtggcgtaatgtatttagagtggcaaataaccagcaccgcccactctttttttgaaagctgacatcaccagtggggaggtcgattgagtaggttggatcaagggtgacggcagcatcggggcgttgactaacggcgttaatgccattcgtcatcacagcatttttgagcgtcgttgcttgtggcacgccagctaaagcggtccgcatcttgattaaattattatgtgtaatttctttggtcatctaatcactccttaatttttgaattagtttaattctagttgattagatgggagatgtaaaccgaataacggggataaagctaaaagaatggtgattgataaatgtgaaagaaaacgatttatatgagagcacgggacacaaaaaaacgaaccgctgagggttcgtttggaaacgtgctttttaaagctgacgcttgcgcttagctacgtattgcaaacgaccgattttgtcggtcatttaaaacactgtgctagtgcacagtgtcaaatctcctttaaacgcacgctttattttgctgttaaaatcttcacgccatcaggtgcgccaaccacgacttggtcgacgatgtctaggaatagaccatgttcaacaacgccgacttgttcactgagccatgatgccagtaggtggggatgttggacttggttgaggtgtaaatcgatgacgtagtttttagaatcagttaagacgtgttggccgtctgcagtcatccggaattctggatttaagccttctttagccattttgttgaacacttgttggctgccaaatggaatcacttcaactggtagtgggaagcgaccgattgtatcgaccactttttcttgatcgacaatccaaatgttgcgggttgaagtagttgcgactaatttttcgaataagtgcgcagcaccgccgcctttaatcccttggaagttggcatcgacttcatcggcaccatcgatggttaaatcaatgtggtcgacatcgttgagtgctttgaccggaatcccaagtgatttggcttgttcttcagtacgaattgaggtgcagacacatgttaagttgaggtgttctgcttgtacccgttttgcgagggcttccaccatgtaaactactgttgaacctgttccgagtcctaaaatcatgttatcttcgacaaaatccactgagcgttcagctgccatctttttcattgcattcttatccatcaagacaccccttttgtattaataaatctattatacgaaaaaaacgctttaattgggcgctttttgttaaatttttaattaaatcagccttaggcattattcacagcctccgcggtttcatggtatgatacagtggtacaaaaagaacccaaatgggcgataatattaggagttttaggaatgaaaaaacgcggctttgaaattgtgaccaaataccaagaggcgggattgagtttaccggtgcgttcaacagcgcattcggcgggctacgactttgcttgtgcggaggacttcgtgttgccatcaatctggcattacaactttgtgcgtttgttccgaatgattcgaaatggcaaaccgttagtggatgacgattttgaacgtgcatcaaaaacgttgaaaccctttctagtaccgaccgggattaaggcttacatgcaagacgacgaatatttaatgatcgccaatcgttcaagtaacccactcaaaaaagggttaattttacccaacggcgtcggcattatcgatgcggattactacggcaatgatgccaacgaaggtgaaatttttatccaaatggttaacttcagtccgcgggatgttatcttgaaaaaaggtgaacgaattggacaaggcatcttcatgccatatttagtcgcagatgatgaagcgacggtaaccaccaaacgaacgggtgggtttggctcatctggtcgctaaacgttaatcgctaggtcgccgaaaattcacaaacttatgttaaaataaaactaatctcgataatgaaggagaatctttgtggctaaaattaagactcagtttgtttgccaaaattgtggctatagttccccgagattcttaggtcggtgcccgaattgtggcgcttggaaccaaatggtcgaagaacgtgaacaacctgcagctagcgcgaaatcaagttttacgatttcagggcgggcaactgaaccagaacaaattagcaccgttaatattcaaaaggaaccgcgtattaaaactgaattaaacgaactcaaccgcgtgcttggcggtggagtggtaccgggctcattgattctaattggtggggatcctgggattgggaaatcaacgttactcctacaagtttccggacaacttgaaaaggttggtaagattctttatgtttctggtgaagaaagtgcatcccagattaagatgcgggctaaccggcttgatgtgaatggcgatcaactttacttatatcctgaaacggatatgggcaatattcggcatcagattgaaacaatgaaacccgactttgtggtgattgattcaattcaaacgatgagcgaaccagaagtgacttccgcagtcggtagtgtttcacaagtgcgtcaagtcaccgctgaattgatgcgcattgcgaagacgaaccagattacgatttttgtggttgggcatgtcactaaagagggcgctattgccggtcctaagattttggagcacatggtagatactgtgttgtactttgaaggggatacgcatcatacttaccgcattcttcgctcggttaagaaccggtttggttcaaccaatgagattgggattttcgaaatgcgtgaagccggcttaaaagaagtcgcgaacccatccgagattttcctagaagaacgtttggcaggggcgacaggttcagccgtggttgtttcgatggaaggcacgcgacccatcttggtcgagttacagaccctaattaccccaacactattcgggaatgcaaagcgcacgtcttcagggttagatcataatcgagtctccttgattatggcggtgcttgaaaagcgtgctagtctcatgttatcgaaccaagatgcgtatttaaaagcaactggcggtgttaaattagatgaacctgcgattgatttggcgatggctgtttcgattgcatcaagctatcgggataaagaaattccaccaactgattgtttcgtcggtgaaatcggtctgactggtgaaattcgccgggtcaaccggattgaacaacgcgtcagtgaagctgctaaattaggctttaaacgtatttatgtaccaaagaataacttacaagggtgggacgcaccgacggatattcaagtgattggtgtgaccacgattgcagaaactttaaagaaagtattcaactaggcataagttggagcgagaggaggttgaacgatgcaacaaaaacgatttactaaaaaaagaatattaggaattgtgttcattatcttaggaggtgcgcttggaattacggcgttcccagtattttggccattagttcatttggaagacatgatgtatctcaataacggtattactaacgccattttaggggccattattttctatctattattcttggcgctggcaacaccaatgttgagagctatgcaccggcttgaaaaagccttaacgaaacaatcacctagttttattttatttgggagtgttttttcactaattggattgttattagcaaacgttgtttcgattccgctataccggatgcccatttttgcattaaatacagttgtacccattttattgatgattgctttagggtatctcggctttcgaattgggacaacgcgaatggaagaatggcgccgtttgatgcaacctaagaaacgcaatgctgatgtattagaacgtaaagtcggcgataatttccgtaagtataagattctagatacaagtgtgattattgacggccgaataaaagaaattgctaagacgggctttatcgaaggcacattgatggtgccaaactttgtcttacatgaactacaattaatttcagattccgctgataatttgaagcgggcacgtgggcgccgtggactggatatcttaaacgatattcaaaaagacgatagcttatctgttgaaatgtacgacggtgatttcgaggatttaacggaagtcgatagtaaactcgttaaattggcaaaattacttgatgggattgtcgtgacgaatgattataacttgaacaaggtctgtgaatttcaaaacgtaccggtcttcaatatcaatcaactcgccaatacgttgaagcctgcagttttacctggagaagcgatgaccgtgacggtggtgaaagccggaacagaacggcaacaaggggttgcctatcttgatgatggcacgatgatcgttgttgaagatggccaacattacttaaataaaccgctagaagtgattgtgacaagtgcgcttcaaaccgctgcggggcggatgatttttgctagaccagcgcatcaacaaaaaggcttgaaagaaaaatagccacgcagaacactttacacggtcgtcaataatctgtatcatggagaccaactaaaccgttaaaattgatgaagagaataagtagatgatgccaattgttaagagagctttcgaattgctggaagaaagccgattgccccatcgaaatgcacctctgaaatgccaagtgactttgtgacttagccgggacaccgttacctgttcaaggcatttttgcaaagaaaagtggaaccacgctcaatcggcgtcttttgttaaccaacaaaggacgctttttatttggaagagtgcgtttgaaacggtttgacttcgagcatttgcctaataccgtgagggagcgccaccggcgatcgtttgcggtatggagcaaagcacagaagtcagtttcaaaaagcacgtttagaagaagagtgcgacagcaggtggttatattttgagcattaactggatttgacgaattggcgatgcaatcgccgattgggcaaatttggttaagcgcagaaataagcctgcaagagcacgtttaagaaaggaagattcgatgttaaccgtttataataccctcacgcgtcaaaaagaagtcttcaaaccgattcaagcagaccgcgttaaaatgtatgtctgtggaccaactgtgtataactatattcatattggtaatgcgcgcagtgcgattgcctttgatacgattcgccgctatctcgaataccgtggctatcaagtcgattatgtctcaaattttaccgatgttgacgacaagatgattaaggctgcgaatgcggaacaaatcacggttccggaattagctgaacgctatatcaccgcttttaaagaagacacccaagcacttaatattgaaacagcgacactcaatccgcgggcgacagaaaacattccagaaattatcgcgttcattcaagacttaattgctaaagattatgcctatgccgttgatggcgatgtttactatcgtgctcgtaaatttaaggactatggccatctagctggtcaagatatcgatcagctcgaacaaggggccagcgaacatacagcaaccgaagaaaccctacgtaaggaagatccaatcgactttgccctttggaagtcagaaaaagggaccgatattgcttgggattcaccttggggtaaggggcgaccaggctggcatatcgaatgttcagtcatgtcgaccaaatatttaggcgacacgattgatattcatggcggtggccaagatttagagttcccacatcatgaaaatgaaattgctcaaagtgaagcgaagactggtaaacatttcgtcaactattggttgcacaatggctttgtgacagtcggggatgatgatcaaaaaatgagtaagtctcttggcaacttcgtgacggtgcatgatttgattcaagaagttaatccacaagcattacgtttcttgatgagtagcacgcaatatcgccgaccaattcgctacagtgaatcattattagctgaagcgcaaacgaacctggatcgtttaaaaacgaccctcgataacttagcgttccgccaaacgactgctgaagcgggtgcagacgcagacattgccgcacaagcggcaagcttggaagacgcctttgtgacagcgatggatgatgattttaacgtgcaaaacgggttaacagaattgtatgaactcgctaagcttagtaatcaatacctggaacgggctaccgtccaagctggtacgttagtggatttaactacccgtctaacgcgcttgttagccatttttggtgttgagtttaaggcggcccaactgttggacgcagaggtcgaaagcttgattgaagaacgcaaagatgcacgggcagcaaaggattttgcccgcagcgatgcgattcgcgatcaattgaaagaacaagggattattttggaagatacaccacaaggaatgagatggagacgcgcatgaaaaatgctttacaactaaacgggattgcgttggcatatatgggcgattcagcctacgaagtgtatgtccgcgcccatttgctagaactcggtttaaccaaaccaacgcgcttgcaacaagtggcgacacattatgtgtcggctaaagcgcaagctgctttgattggtttgatgatcgatgataattatttaacagaagaagaaatgaatatttttaaacgcggtagaaatgccaaaagttatacgaaagccaagaatacgagtgtttcgacttatcggacctcaacgggctttgaagcagtttttggctatctatacttaactgaacaacaagagcgcgtcgctgaattagcccactggtgtattcaacaagtcgacgctgggaggacccatgagaaaaaataataaccaaccattcaaacaaaagaacaacgaattcaatagtcgtcggacggccaataattcggcaaagccaacgcgccgtccagctaacaagaaaccagcagcacccgtcgaagaagcagttgttgaagaacaaactgatttcgtcatcggaaaacacgcttctttagaaacattgaagaccagtgatgcgaagaaaatcaataaaattttcttacaagatggcttgaaggctgactttgtccacgatgttgtgaaattagcgaaagaaaaacgtctaatcattcaaaatgtgcctaaaaataagttggacttattgagtgaccgtcaaaatcaccaagggattatcttagcaatcgcaccgtttgaatatgcgagtgttgatgatattttcgctaaggccaaagcccgagaagaagaaccgtttatcttaatcttggataacttggaagatccccacaacttgggttcaatcatgcggacagctgatgcggttggtgtgcatgggattattattcctaagcatcgtgcggtggggttaacatcaacagttgctaagacatcgactggtgcgatcgaacatatcctagtggcgcgtgtcacgaacttaacacaagaaattaagaaattgaaggaccgtggtctttggatttttggcaccgatatggctggtaccgactatcgtaagtgggatgctaaaggaccaatcggcttaatcattggtaatgaaggcaaggggctttcaccaattgttaaaaaagaagttgatcaaacgttgacgattccaatggtcggtcatgtgcaaagtttaaatgcgagtgtcgctgcgggggttttaatgtatcaggcttataatagccgtcaacctttggtatagcagatgaaaaaacagatcttaattgcagatggttataatatcattgggaactggcccgagctgaataagttgaaacaaaatgatcatctcgcggatgcgcgtgatcgcttattgcagatattatcagaatatcgcaagtttcgtgagattgaagtcatcttagtatttgatgcaatgtatgtgccagggattaaacaaagttatgtgcagtataatttggaagttgtcttcaccgatgaggatgaaacagcggacagttatatcgaaggcttagcgggtaaattaatgtcgccgattacgcaagtgacggtggtttcgagtgatcaagctgagcagtggacgattttttcacggggcgcattgcgggtgtcttcgcacgatttttatcgtgagattcgccgaacgcaccgtgaaattgaccatgatgccaagcattatcatgatcggaccttgcaacggaatatgccgtggaatccggcgcaactagatcaacttgcacaggtgcgagatgcactaagtgctgaaaaagatgattaaacaaacgttctcttaataaatgtacgataacttgttaagataaaggcgtggggttgcgtgagaggtggttcattgatggaattagcaaaacgtgatgcaaacttaattcaagcggtggttgaaaacgattctgaggcgttggatgttttatttaaagcctacctaccaatggtttatcgcacctttactccatattatattcgcttatttgatgaggacgattggttacaagaagcgcgaatcgtctgttatgagacttgccagtgttatgatcaaaattgcggcaaaagttttggtggtttttataaattacgctttcaccaccacgtattaaacttgattcgcaaagaacttgctcagaaacgacgggtcgatcagcaagccctgttatttgattgttgtccggaatgcaatgcgctcgctgaagataccgtggcatactatcagtcaacggttgaaatgcgggcgtacttagagacactatctgctttagagttagtggcctttcgggttttgacggggcaactagcagttgagcaagcgtgtagccagctagattgcacgtttgaacagatgaaacgggcacaatcgcgttgccagacaaaattaaaacgattctatactaaacaataaaatagctaaaagctgctaaccgacgatttttaggcattggttagcagttttttgtgtttagtagggagcataaaaaatacttttcatgcgataaaataacaggtgacaggttaatgattgggataggtcaacaaaatgggcggcttatatatttttaaataacattaattgacattaataaagaaagcgcttatactaaaaacatagaggaaatgaaaacgctttttataagccttttatcgctttctaaccaattaaaatttaaggggtaattcattatggcagaaaaaacaatcatgttatgttgtgcagcagggatgtcaacaagtttattagtttcaaagatgcaaaaggccgctgaagcacaaggtttagacgcagaaatttttgcaactggcgcttcagatgcagacaaccaactcgaatctaaaaaaattgactgcgtactattaggccctcaagttcgtttcatggaaggtcaatttaaagaaaaattggcaccaaaaggaatcggtgttgaagtaattgatatgaaggcttacggcatgatggacggcgaaactgtcttgaaacaagcgttagcattaatcggttaaaaaaagattaagaaaagcggtagcgacctatttttaggcggctaccgctttttttgtttatgaatcaggtataattaaggtaatcaagtataaaggagtttattcaatgagtttaattggtacattaatttggtggctattcgggggattagtagaggctatcggttggtttattctggggattgcctggagtattacgattattggaattccagtcgggctacaatgttttaagattggcgcattgaccttgatgccgtttaacgcaaccgttgtttcaacggggggtgcaggttcgtttttattaaacattgtttggtttttcttaggtggtcttgtgatgtgggcgagccatgtcttttgggggctattattatcaattacgattattgggattccatttggccggcaacactttaagctagcggcgttatcgttaagtccgttcggcaaacaaattaattaaaatgcaaaagggcaacgatattgatcgctacccttttttatgtggtgcaggcatatttctgtgcttagctacacaagtcaaacgattgcttgtagcaagcattcgccttgttaggctgatgctcgcagcataaccggcttttgacgcactctattgtgttagttcttctagtgccatcgcttgttcttcccagtctgattctgtttgagcgagttcagcttggactttttctaggtcttgttgtagttcttgaagcatgaggggtttagtaattacgtctgcttgggtcatttgttcttggattgcgttggccttagtctctagtgcggccattttttcttctaaagcagtaacttcgcgttctagtttccgttgtgcacgttggttttccttacttgctttgtaggcatctagtgcattggcacttggttggataattgcactgttttggctagctgcttctgcgtaagctgtttcttcagctttcttggcgaggtagtaatcgtaatcaccgaggtatcgtttgctaccagtatctgatagttcgataatgccagtggcgacttgattgatgaaataccggtcatgggaaatgaagaggacggtgccatcgaattcacggagggctttttccaagacttccttgctatcaatgtccaaatggttcgttggttcatccatgattaagaaattgtcatggttcatcgcgagtttcgtcaagagtaagcgggctttttcaccaccactgagttgtgacacaacctttaaaacatcgtcaccggtgaataagaaactaccaagtagtgtgcgaatttccttttcaggtgttgtatggtgttcatcccataattcgttgaggacggttttgttagtgtgtaaattgcgttgctcttgatcgtagtagcccattgaaacgttactaccgactttttcatggcctttgatgaacggaatttggtgcaagatacttttgagaagggtcgatttaccaattccgttaggtccgatgatggctaagcgttcgtggcggttcacttcaaaattgattggttgtaccatgattttatcgggggaatagccgacagcggcatcgcttacttgcaatacttcgttaccgcttggatgttcgctttcgaaatgaaaatgaattttaccggcttcgttttgcggccggtctaatttatccatcttttcgagttgacggcggcgactttgggcttgtttcgtggtacttgcgcgcactaagtttttatcaacaaaggtctgaagtttatcgatttcagcttgttgtttttcataagccttccattcgagtgagaggttagcttcttttaaacttaagaaatggctgtaattaccggtataatgggtcaatgtgtggcgactcatgtcgtagacttctttagtgattttatctaagaagtaccggtcatgtgagacggtgagcaaggcaccgggataagtttgtaaataattttccaaccatgttagtgtttcgatatctaaatggttcgttggttcgtccaaaataaggacgtcttttttctcaagcaataacttagcaagtgcgagtcgcgagcgttcgcctcccgatagtgtactgattggcttttcaaaggtgtcttctggaaattggaaaccatgtaagacgccacggatttcggcttcatagccgtaaccattagcttcagagaaatcgtgttggacttggtcatatcgttttagtaaggctgcatattcttcgctagcatggtcaatggttgtgtccgcaattgcggtctcgagttcatgcatttgggcttccatttggcggagatcatcgaaaatggttaacatctccgcatagattgtccgggttgagtctaagccactatcttgcgctaagtaaccgacttgagcatttttgctaagaatgatttggccttcatcaggcgttgtgatgccggcaatcatttttaataaggttgatttaccagccccgtttggaccaacgagggcaacacgggcgcggtcttgtacttcgagttgtgcgtttttgaaaaggtaatcgccgccaaaactgcgtgcgacttgttgaacttgtaataatatcacggctaaaaatcctttcgtgcggtgttttttaaagttaattgcgttcatttttataatactactgtcaactatcataacagatttaaacgatggacagtcaaaattgtaaatatattgcttttcacaagaaaattcagtatgatttcagtatggtactacactattttcacaagcaaatcaaaaaggaggtttcaaatggttgagaataatatcccaagagcaactgcaaaacgattgcctttatattaccgctatttaaactttttgaacaattcagggaaaactaaaatttcctctactggattatctgaagcagttaaagtagatagtgcgacaattcgtcgtgatttttcatatttcggtgcactgggcaaacgtggttatggctatgatgtcgcttcgttgctagattttttcaagaagaccttgaaccaagatcgattgacaaacgttgcattgattggggtggggaatttaggccacgccttattgaactacaactttaagcaaaccaataatattcggattagcgcagcatttgatgttaaacccgaaatgattggaacaattcaaaccggtgttcctgtctattcaatggacgagatggccgaacaattgaagaaccaacagatcgagattgtcattttaacagtgccaattgatgaagctcaagaagtcaccgatgaattagtggccgctgggattaaagggattatgaactttacgccaattcgaatttctgtgccatcaaacgtgcggattcaaaatgttgatttggctaaagaactacaaactttgatttacttcctcgataattatactgatgaacaaaatcaagaataaaaatagcgtttaaacaagttgctcgtagtagccgcctgtttgaacgctttttttaacgattgagatacagtaaagtgacgatcaggttcatcccagcatggctgatgattgtggtgaaaatcgaacctgtcttgcggtacagccaacataggaaaagaccgatggccgtgtagattaacaaatgcccgtcctgatgtaaaaaagcaaacagtaaacttgaaatgatggcggctaaaatgcggtttaagcgactggctaatccaccaaagattgctttgcgaaacgtgatttcttccataatcggtgcggcgatggtcgttgctaaaataagaaacggttgttgttgcatcatggtcatcagtgaaatggtgttgagcgatttggcagtgatgtggagaatgttttgttcaatgaagccggcgagaatctgaattactaagaccagtacaatgccacacaacccccaaatgataatgggtttgagtgggaaaggccgctgctcaatggcattggcttgtgtgcgttgattaagatagagtaaccaggcggcaccgaggcaatcaacaatggttgtgattagaaaaaacgaggcagatagatgaccaaaacggacgactgcactaggaatcaataaaatgaacaaatagctaatgataattgaaaaattttgtttgtatagcgtcatgtgaaagctcctcaaaggttgttgtgacaatagcttagcgtattagcattcaaattgcaaaagtgctagcataatacttgcaatgttctgaaaaaatgctatgataaaaattgtgattagcacttgagatgatagagtgctaaaaaagtaaaattgatggagggattttaagtgttaaaaccattagaagatcgcgtgattatcgccgttaaagacgaagaagaacaaacagtaggtgggattgttttggcaagtaatgctaaacaaaaaccacaaaccggcaaagtagtcgcagttggtaccggcacattaacaagtgacggcaaacgaattccacttgatattaaagaaaacgatgaagttatttacgataaatatgcaggttcagaagttgaatatgaaggtcaacaatatttagtgctccatgctaaagatattatggctattgttgaataataataaacaaaaaaattttttgaggtgaataaattatggcaaaagaacttaaattttcagaagacgcacgttcaaaaatgttggcaggggttgaccaattagccaacacagtgaaaacaacattaggaccaaaaggccggaacgttgttttggaaaaagcttacggttcaccagaaattactaatgatggtgtgacaattgctaaagcaatcgaattagaagatcattttgaaaatatgggtgctaagttagtttctgaagtggcttcaaaaacgaatgacatcgctggtgatgggacaactactgctactgttttagctcaagcaattattcgtgaagggatgaagaacgtcacagccggcgctaacccagttgggattcgtcgtgggattgaattagcaactaaagaagctgttaagaagttacacgaaatttcacacaaagtcgaaagtaaagatgccattgcccaagtggctgctgtttcatcagctaacgaagaaactggtcgtttaattgctgatgcaatggaaaaagttggcaacgatggggtcatcacagttgaagaatcaaaagggattgatactgaattaagcgttgttgaagggatgcaattcgaccgtggttacttgtcacaatacatggtaacggataacgataagatggaagctgacctagataacccgtatatcttaattacagataaaaagatttcaaatattcaagatgttttaccacttttacaatcaatcgtgcaagaaggtaaagccttgttaatcatcgctgatgatgttgatggcgaagcattaccaacacttgtcttgaacaagattcgtgggacattcaacgtggttgctgtaaaagcccctggttttggtgatcgtcgtaaggaacaattagaagatatcgccacattaacaggtgccacagtgattacaagtgacctcggtctagaattgaaagaaacaactatcgatcaattagggacagctggtaaggtaactgttacaaaagatgatacaacaatcgttgaaggtgctggtagcaaagatgccatcgctgaacgggttgaaaacatcaagaaacaaattgctgaaacaacatcagactttgaccgtgaaaaattacaagaacgcttggctaaattagctggtggcgttgcagtgattaaagtcggtgctgccacagaaacagaattgaaagaacaaaaatatcggattgaagatgctttgaacgcaacgcgtgcagctgttgaagaaggctacgttgccggcggtgggacagcattaatcgatgtgatcgaaagtgttgctgcgcttaaagaagaaggcgacgttcaaaccgggattaacattgtgcttcgtgcattggaagaacctgttcgtcaaatcgcaaccaacgctggtcttgaaggctcagtaattgttgaaaaagttaaatcacaaccagttgaagtcggctacaatgcagccaacggcaactgggaaaatatgattgaagccggcatcttagatccaactaaggtgacacgttcagcattacaaaatgcagctagtgtggcggccttaatgttaacaactgaagcagtggttgctgacaaaccagaagacaacccagcaccagcagcaggcatggacccatcagcaatgggcggtatgatgtaaagaagtgcgtttgaaacgggttggttctgagcattaacctaaaaacgagcgttatggcggtttttgccataacgctcgttttgtagttaagcggaaggcgttataaccaaaaagcacgattaaatccaaagttccaaaactggcaaaagttttggaacttttttatttttcaaaaaaaatgcgcatatataaattgtgcgcaaccctattaattaatttgattgcggtataataatagttggaggtgttgacaatgatttttcgaaaccggcggatactgataacctgtttaatgttaggtggcttctttttagcgcgaccacaaatggtccaagcaacgcctgaagaaacgcaaactgccattaagacagcacaagatcatctatccgaattgaataataatattagtaatttaacgttaaaaacaacgcaattgaacgaacaaatgactgcaaaacaggcggatattaaagaaaaacaagacgagttcagcaaaacatctgctgattatcaaaagcaagtggcgactattgaaggtaacctgcggcaattacaaacacgagatagcagttttaatcttgatatgatcgatagtttattgtcgagccaaagtttgagcgatttattccaaaaaggttcaatcatcaatcgactgttagacgctaaggcggataatgccgctgaaacggcctcattagctgaaaaaaagctgaacaaaagactgaattagaagcgcaacaggccaagctggtatcattatcacaggaaaatgatgccgcaattaaggacttagatcaacaaaaacaacaagctaacgaccaattaacgcaactacaaacgaagttcaagaaagaattagaggcgcaagcggctgctcaaaaagcggcgagtgatgcaggtgccgcattaattactggtaacaaggatttaatgaataataagattatccaagaagcggttaaatatttaggcgaccctatgtttggggtggcaccacacccgaaggatttgactgttctggcttagtgcaatacgtttacgctaaaaatgggattaaattaccccgtgtttcacaagatcaaagtaagttaggcaaagatgtaccgctcaatgaattacaaccaaacgacctattattctggggaggggttggaacagcccaccatgtcgcaatctacattggggatggctactttatccaagcaccacaacctggcgataaagttcgaattactaaaatttcagattacaaaccagattttgcccgtcgtttatcataaaaaataagaactgaccaaggaatcgaggcgtttcgattaccttggtcagttcttttttaaattgtggtagtaattcatgcgtaactatagtagaatacgatttgtttgaataaacggcaattatttttttaagttatagagaaattcaaaagtcactgtgtggattgcgacgaatgatattcacatgagggctttttatgttagaaatattatttaaaggggtcatattgctatgcaacagttaaaacggatttttatcgggaaaccgttaaaatcttccgatgagggtaatcaaaaattaggacgctttaaagcgttagcgatgctatcttctgatgcattgtcatcagtggcctacgggacagaagaaatcgtcatcgtattgacgaccctttcggccgcggcaatttggtattcaattccaatcgcagcctttgtgctcgtattgctattgtcattaactttgtcatatcgccaagtgatccacgcctatccaggtggtggtggcgcctacgttgtttccagtgaaaatttggggaaaaatgctggtttagtggcaggtggttcactgcttgtggattacatgttaaccgttgcggttagtatttccgcgggtgcggaagcgatcacctcggccattccggcattgtatgggcatcaagtagggatttccttcattatcgttttgatcttgatgggaatgaatctacgtgggatgcgtgaatcagcatcatttttaatggtgcccgtttacttattcgtcttgatgatgactttaatgatcatcgttgggtgttataagatcttcacaggtgcgattccgttccacgcaacatcaaccgttggggctgttgtaccaggtgtttcgatggcgttgatttttagagccttctcatcaggttcatcatcattaactggggttgaagccatcagtaatgcggtaccatttttcaagaagccacgtgcaacaaacgcggctgaaacattagcaatcatggcagccatcttaggtttcttctttgctgggattacatttttaaactactggtacggcattgtaccagcagaaaaagtaactgttctatcacaagtggcccaacacacctttgggaaaggctttttattctatattgtgcaatttgcaacggcctttattttagccgtcgctgcgaatactggattctccgcttttccagtgttagcgtataatttagccaaagacaaatatatgccacacatgtacatggatcgtggcgatcgtttaggttattcaaacgggattattacattggcgattggttcaatggcattgattttcatctttaacggggatacatcacgcttgattccactttatgcggttggtgtgttcattccatttacgctttctcaatctgggatgttgcgcaagtggtgggtcgaacgaccaaagaattggtttggtaaatcaattgccaattttgttggcgctttgatttcgtttgccatcttagtcattctcttcgtttatcgcttacctgatatctggccattcttcatcatcatgcctgttatgatttggattttctataagattcatgatcattacaagaaagtggcgcttcaactacgcgtgagtgctaaagaagccgtcttgcatgattatgacggttcaactgtgattgtcttggtcagcaacgtgacccaagtaacccgtggtgcgctagattacgcacaatcaatcggggattatgtgattgcgatgcatgtctcaacggatgaaaatccagccaaggaacgtgaaattcaagctgaattcaaggaagattttccgaatgtccggttcgtcgatgtccattcatcataccggtcaattcaaaaaccaattgttcgctttgttgacattgttagcaagaatgcgcaaaaacggaactttacaaccacggtcttggtcccacaattcgtaccaagaaaaccatggcaaaacattttgcataaccaatcaagtctaagactaagaacggcatttgcaaaccgcgaaaacattattatttcaacatatagttatcacttaaaacactagaagtgcgactcgatctgagtaggctttgaggattaacagtaaaatgggcattgtggcggttcttgccatgatgctcattttgcagttaaccggaaaagactgatcgaggagcgcgttaaagaaagaagtgcgtttagcaaccgagcattaatacaaaattggcagttatcccgagttgtgggatgactgccaattttagattaagcggaagttggtgcaactaaaagcacgttagaagagaagtgtgtttgaaacggtttgactttgagcattagcctaaatctgtgaatgagcgacggagttgatcgtttgcggattgtagctaagcgcaagagtcagtttcaaaaagcacgttaaaagaagaagtgtgttcaaaccgattatgttctgagaattagcaaaattagacgaataagcgacgaagtcgattggttggctaattaggctaaacgcaggaacatggtttgaaaagcacattatcagccccgctcaccttttcggtgcgcggggctttttttgtttttctacgggtacagcaaaactttttattctgggcaaaaattgctacaatagaagctatatcaaagtctgagaaagaacattaaggggcgcaacatgcgaattttatttattggtgatacagtgggcacaatgggtcaaaaaatgatcaatgattacctaccagcattaaagcaacaatacaaaccacaggtgaccattatcaacggcgaaaacatcgcggatggtaaggggatgactcaaaaggattataagaatcttttacaagctggggccgatgcgattacgatgggcaatcatacttggaataagcgcgatattttagaattcatcgacgatgctaaaaaattagtgcggccggccaattttccgaaaggaacgcctgggcaagggatgacaatgattaacgtcaatcaagccaaattagccgtgattaacttacaagggcgcgccttgatgaatgaactactaattgatccgtttgaaatgttagatgaaatggtggctgaaattagtaaagaaaccaactgtatcttcgttgattttcatgccgaaacgacgagtgaaaaactcgcacttgcttggtatcttgatggccggatttcagcgttagttgggacccatacacatgtgcaaacaaacgatgcgcgcgtcttacctgaaggcacagccgttttaacggatgctgggatgactggcccttataacgggattctaggcgtgaagcgcgaaaagatcattaatcggtttaaaacacaacggccagaacggtttgaattagtgaccgaaggaccgggtcaattgaatggctgtttaattgaaattgatgacaaaacgggtcacgctaaatcaattaaaccgatccagatttcaccagatcacccctatacgcaattttaagcaccttagcagcagatcaacgtcaatgagagagggattaacaacatgccacaaaaaacgaaagaaacgccaatgatggcgcaatatcaaaaggtcaaggatcagtatccggacgcttttttattttatcgcctcggtgatttttacgaactctttaatgatgatgctgtcaaagcttcacaattattggaactcacactaacagcacgcaataaaaatgcggatgatccaattccaatgtgtggggtaccacaccacgcagcccaaaattacatcgatattctagtcgatcaaggttacaaggttgctatttgtgaacaaatggaagatcctaaaaccgctaaagggatggtcaatcgggaagtcattcaactggtcacaccaggaacgatgatggatgaaaaagccggccatgccaaacaaaataattacttaacagcagtggtggcagatggcgatcagtttggctttgcttataccgatttatcaactggtgagatgaaagtcagccagattgcgagtttggatttattgctcaacgaaatgttgagtttacaaaccaaagaagttgtcattaaccacggtgttaccagtgaggttgtgcacgcgtttgttcaacaacaaattctcgtgtcgtatcaagaagatggcgatgcaacggccgaagtcagtttcgtttcacaaaacatctcccagccccttgaactggccgtgattaaacaattggtcttgtatttggcaacgacgcaaaagcgccatttagggcatttacaacgggcccaagagtacgagccatcccaatatttaaaattagaccattctgcgaagatgaaccttgaattaacggcttctttacgcactggtcataagagcgggacattattgtggttattggatgaaaccaagacggcaatgggtggccggttattaaaacaatggttagaacggccattattggatttaaaggcgattcaaaaccggcaacgccaagtcgctagtttcatgaaccattattttgaacggacaaacttgcaagacgccctcacaaaagtgtatgacctagaacggctagcaggtcgggtcgcatttggcagtgttaatggccgcgatttaattcagttgaagacttccttggaacaaattccaacgattaaaacgattttaacgggcattaatgacgatcagacctttgaccgtgcgttagaccaactcgatccggttgatgatgtacgcgagctcattgaaacggccatcaatcccgatgcgccaatttcagtgactgacggtgggattattcaatcgggttacaacgaaacattagatgattatcgcgatgcgatgtctaacgggaaacaatggctagcacaacttgaagctaaagaacgcgaaattaccgggattcataatttaaaaattggctttaatcgcgtgtttggttactatatcgaagtgacacgtgcgaatttagacgcgctacctgaagggcgttatgaacggaaacaaaccttaaccaacgccgaacggttcattacaccggaattaaaggcgaaagaacaattgattttagaagccgaagaacgctcaaccgcgcttgaatatgagttattcacgcaagttcgcgaaaccgttaagttggagattgaacggcttcaaaccctcgctaaaagtgtggcggcccttgatgtcttacaaagttttgccgtagtcagtgaaaactaccactacgttcagccgacattaatgactgatagtcgcgaaattgatttagtggatgggcgtcatccagtggttgaaaaagtgctcggtcgccaaaaatacattcccaacgcggttcaaatgggcaccgatacggatatgctcttaattactggtccgaatatgtctgggaagagtacgtacatgcggcaactggctttgacggtcatcatggcgcagatgggatgttttgtaccggctaaatctgcgaacttaccgatttttgatcagatctttacgcgcattggtgcggccgatgatttaatttccggtcaaagtaccttcatggtcgaaatgatggaagccaatcgcgcgattatgaacgcgacacaaaatagcttgattctctttgacgaaatcggacgcggaacagccacctatgatggaatggccttggcccaagcgattattgaatacattcacgacaacgtgcatgccaagatactcttttcaacgcattatcacgaattgaccagcttagcggattcactaaccgcattgaaaaacgtccacgtcggggcagttgaagaaaatggcgagttagtctttttacacaagatgctggctggcccagctgataagtcatacgggattcacgtggctaaattagcggggatgccgacaccgttgttgaaccgcgcagatgtcatcttggatcaattagaagataaaccaaaggcagctgtcgcgccggctgctgaaccggttgaagaagtggatgaacaaatttcactattcgaaccagaagtggcaccacaagcggatccaaaagcagctaaagtcctagcggcggttaaacaattcgacttaatgagcgccacaccactagacgcgctaaacatgctatacaaatggcaaaaggaattaaacaaataagagtgcgtcatcaacgggtaacttctgagcatttacagcacttgacgaattggcgatgtaatcgccgatttggcaagtggggtaaagcggaagaagttgttgatgaaagcacgtttcggataagagtgtattcaagcttgtccaacttttgagcattagcacagggaagcgaattagcgacgcagtcgatgatttgattcacagcgctaagcgcagaaagttagcttgaaaagcacgttttagcactaaatacccacacgtcagaaaaaggagaacgctaatggggaaaattcatgaactgtcagaaatattaagtaaccaaattgcggcgggcgaagtaattgagcggccagcttcagttgtcaaagagttggcagaaaatgcgattgacgccaatagtactcaaattgacatcgtgattgaacaggctggtttgcaattgattcaagtcatcgataacggcgatgggattgaaccggaagatgtacccactgcatttaagcgacacgcgacaagtaagattgccacgcgccaggatcttttcaaaattcagtcacttggctttcggggtgaagcgttagccagtatcgcgtcagtgtccgatttgacgattgaaacggcaaccgctgattcgttagggacatttgctcattttaaaggtggcgtcttagaagaacagaaaactaatccaattcgccctgggacggcaatcacggttcgtgatttattcttcaacacgccagcccgcttgaaatatgtgaagacgttccagactgaattggcaaacgtgatcgatatcgtcaatcgcttggcgatgagtcatcctcagattgcgttcacgttaaccaatgatgatcacctgctgttaaaaacggcgggtaataacgatttacaacagacgattgccgggatctatggcgttacaatggctaagcaactcttgccagtcagtgcagaagatctcgattttaaattaaccggctatgtatcgctaccgaaactaacgcgggccagtcgtaattacatttcagtgttgattaatggtcgttatatcaagaattatcaattgaataaggcgattatcaagggttacggttcaaaattaatggtcggccgttatccagtcgtcgttttaaatattcaaatggatccactgttaatcgatgtcaatgtccatccgaccaagcaagaagtccgcttgagtaaggaacctgctttgatggcgttgattgaaaaagcaattcgtgagcgactcagcaccgagaatttaattcccggtgcagtgcagaatctaaaacaaacgaaaccggtcgatgtggaccagcttcaaatggatttaaaccaaattacgagtcaacggcgcaatgcgactggtacggtgcggccaattcagccccaaacagttcctgaaaagccggttaaaactgaaatgcaagcggcagcgcaaattgcggaaaccgaaacaccccttaaacgagaaccaactgctaatcctaatttaaatagcctgccgatatttgaacaaccccaacaattggcccggtgggatgataagtacgaagcagaggcgatcggaaatccgtttggtgaacaacctgaagatgatgcagcacccattgagcgtttcccagcgttacgctatattggacaactgcacaatacattcttattagcagaaggtgaagatggcttttacatcttagatcaacatgctgctcaagaacggattaagtatgaatactatcgcgaaaaaattggtgaagttagcaacgacgcccagaatttattggtgccccttgtgttggaatatcccaatagtgatgcgattaagattcaagcacaaaaggaactccttgccgcagtgggtgtgcagctagagagcttcggccaaaatagttttgttatccatagtcatccgacgtggattgcgcaaggccaagaagaagcaacgattcgcgagatgattgacactgtattggaaaacgggaagttagacattgcccatttccgtgaaaaaacggcgattatgatcagctgtaaacagtcaatcaaggcacaccatcacttagatgatgcgcaagctaaagcattgttggttgatctggcacagacggaaaatccgtttaactgtccacatggccgaccggttttaatccattacacgcaaaaagatttagaaaaaatgtttaaacggattcaagatccacaccatagttgggagggcgaataatgtttatcttagcatcacaatcaccaagacgccgcgaacttttacaaaaagtcgtgcctgatttcgaagtccaacccgcaacaatcgatgaacgccaggtaccagtgacggcaccagctgactacgtgcagatgttggcgcaacttaagggtgaatccatcgcccaaaagaatcctcaggccactgtgctcagtgctgatactgttgtcagttttcagggcacgatttacggtaagccacatgatcgtcaagatgcagccgaaatgttacggcaattgagtggcagcacgcatcaagcttatacaggtgtttggttatccattgatggtgaaatccgcaaaacggttgtccaaactgatgtcacgttctggccgttaagtcatgaaatgattgaaacgtatttagacaccgaagagtaccgggataaggctggtgcttatggtattcagggacagggaagtctgctcgttgagaaaatcaacggtgacttttacaatgttgttggcttgcccatcagtacggtggctcggttgttaaccgctaaggaggctgactaatggcaacgcaaaacattgccgtttattgcggcgctagtagtggtaataaaataatctacacggaagcggctaaggcgttaggcacttggattgctgggcgcaatgcgcgcttgatttatggcggcgcccaagttggtttaatgggcaccgtggccgacacggtgttagcccatgatggacaagtgaccggcgtcatgccagggtttatgagtcagcaagaactcgtccatccaggtttaaccgaaatgattaaggttgatacgatgtcagcgcgtaaagccaagatgattgaactggcagatgtgtttatcgcattgccgggtggtcccggtacgctggaagaaatgagtgaagttatttcatgggcgcgaattgggcaacaaaatggtccctgcattttttataatgtcgcaggctattatgatttgttacaacaatttttagcccacatggtcagtgaaggttttttaacacaggtcgattttgaaaaatacttatttaccgattcgttcagtgtgatggcatcctttatcaaggattaccaaccgccgaagattcgtgaatactaattgctagggtttgagttggccgtgggtcacacttaggcccttcttttacgctttttggctgctggctgtttcacgattcggattttatgttacaatttaacaagcaaatatacgttctcgtaaagtaggtaaatttatgtatgaatatttaaaaggtttggtgacggcggttagtccgtactatgtcgtcttagaagttcaaggcgtcggctatcaattgcaagttgctaatccgtatcgttacaccgaatcaacgaccgatatcgttcagatttatgtctatcaagcggttcgtgatacggatatcacgttatttggtttttacgatctagatgaaaagcaaattttccaaaaattaatcagtgtttctggaattggtcctaagagtgccttggccatcttagccaatagcgatcattctgggttaatccaagcgattatgaatgatgatgtgagctatttgaccaagttccctggggttggcaagaagactgcccaacaaattgtcttagatttaaagggcaagctcggtgatttggaacaaaccgaaacgctcgctggtcaaacggctatcgatcttggtacgcctggtgaatcaccagaattaaacgatgcgttagcggcgttaaccgcgcttgggtattcagcccgcgaagtcaaagcgattaccaaaacactggctgatttcaatgcacaaactacggatcagtacttacgtgaaggtttacgcttattaatgaagaaataaaggaggactaatggatggcagaagaacgaattgtttccgcagaaaacgaagatttcgcagaaacaagtattgaaaagacgttacggccacaagtcctcgcgcaatatatcggtcaagaccgggtcaaaaatgagttggcggtttatattgaagccgctaaaaagcgggaagagtcgttggaccatgtgctattatatggcccgcctggtttaggtaagacgaccttggcgatggtgattgccaatgaactgcatgttcagattcggacgacgagtgggccagcaattgaacggcctggcgatttagtcgcattgttgaacgagttacaacctggtgatgtactatttatcgatgaaattcatcgcttgccgaaagtggtcgaagaactactttattcggcgatggaagatttttacatcgatatcgtggtcggacaagggccaactgcgcacccggtgcattttccattgccaccgtttaccttgattggcgcaacgactcgggccggtttattgtcggcaccgttacgtgatcgtttcggaatcgtcgaacatatggcatactatgatgaagatgatttggtcgatatcgttgaacgctcggcagatgtctttaacatggccattgtccaagaaggcgcgcatgagattgcccgtcgttcgcgggggacgccgcggattgcgaaccgcttattaaaacggattcgcgattacgctcaagtggcggaccaagcggcaattgatcaagcgattgccgaccatgcgcttagtcaactacaagtcgatgtacgtggcttagatagtattgaccgcaagattctccagatgatgattgactattatcatggcggtccagtcggtctaaagacgattgcggctaatattggtgaagaaaatgaaacaatcgaagccgtttacgaaccgtatttgttacagattgggttcttaaaacggacaccgcggggacgtgttgtgacgcccgctggttatgaacatctcggcattccctattcagaaaattagaaagaggttacacaatggtttcaacagaagattttgattataatttaccagaagaattaattgctcaaacaccgatgattgaacgggcagcgtctcgtttattggtgatggatcacaaaacaggcgcactagaagataaagttttctacgacattatcgatgaattaaatcccggcgatgcagttgtcatgaacaatacgcgggtcttgccagcacgtttatacggtgtcaaaccggatacgggtggccacgaagaagtcttgcttttaaacaacacgcatgacgatgaatgggaagttttgatgaagccagcacgccgggccaaagtcggcaccgaagtcgtttttggtgatggtcaattaaaagcagttgtgaccaaggaactcgaacacggtggccgcatgatcgaatttaagtatgatggcatcttcatgcaaattctagaagccttaggcgaaatgcctctaccaccatacataaaagaaaaattagacgatccagaaatgtatcaaaccgtttatgctaaagaaccaggttcagctgccgcaccaactgctggcttccactggacagaagaactcttgcaaaaggtgcaagataaaggcatcaaactcgtgtacttaacgttgcatgttgggttgggaactttccggcctgtttcagaagacaacgtggaagatcacaaaatgcacagcgaattttaccgtttaacagaagaagctgctgcaacgttgaatgaagttaaacaaaacggtggccgcatcgtggcaacggggacaaccagcattcggacgctagaaacaattgcgacgaagtttgatggtgaactcaaagctgatagtggctggacatcaatctttatcaaacctggttatcaatggaaagctgttgatgcattcatcacgaacttccatttaccaaaatcaaccttagtgatgttggtcgcttcatttaccggtcgcgaaaacatcttaaatgcttatcaacacgctgttgatgaacggtatcgtttctttagcttcggcgatgccatgtttgttaaataattcgacaaaaatgaggtggcagcattgatgtatttgagaaaagcaacgtttacagatttaccgcggattttagagattatcgaacatgcaaaggccgccttaaaggatcgccaaataaatcaatggcaagcaggtgaacctaatcaaactcagtttgaagacgagattcgccaagaattatgttacattctgatggctgaccaacaggtgattggggtcgcctcaattctagcaactgaagatcctggctatgcagcaattaccaatggtcaatggcaatctggttcgacaccttatttttcaattcaccgtgtcgcactcgatagtgccttccacggccaacatctcgggacacagtttttaaccttattggtgaccgctgccagtttacgaggcgcacatgatttacgcatcgatacgcaccctgataacttggcgatgcaacatatgattcaaaaagtaggctttcaatatcgtggtgacatcttcattgcaaacggtccgtcaccgaaacgctatgcgtaccaattattactgaaccaacaataatcctagaattggagtcgattaaatggaaccagcgatcaagtatcgtttaatcaagaaagaaaaacataccagggcgcgccttggtgaaattgtgacaccacatggcacgtttaaaacacccatgtttatgccagttgggacccaagccagtgttaagacaatggcgcctgaagaattaaaagaaatgggtgccggcattattttatcgaacacctatcatctctggttacgacctggggaagacatcgttgaaaaagccggtggtcttcataagttcatgaactgggatcgcggtgtgttaaccgattctggtggtttccaagtgttctcacttgcgagattacgggatatcagtgaagaaggggttgctttcaagagtcatttgagcggcgaaaaactgttcttatcaccggaaaaagcaatccaagtcgaaaatgctttgggtgccgatatcatgatgagtttcgatgaatgtccaccattctttgaaagttatgactacgttaaaaaatcagttgaacggacatcacgttgggctgaacggggcttgattgcgcatcaaaacccagcaacgcaaggtctatttgggattgtccaaggggccggctttgaagacttacgccgccaaagtgcgcgcgatttagttgggatggacttccccggttattcaatcggtggcttatcagttggtgaatcaaaaggcgaaatgaatcgcgtgcttgatttcacaacaccaatgttacctgaagacaaaccacggtacttgatgggcgtcggttcgcctgatgccttaatcgatggtgtgattcgcggtgtcgatatgttcgattgcgtgttgccaacccggattgcccgtaatgggacaacgatgacctcacaaggccgattagtggttaagaatgcgaagtactcagaagacttccgcccattggatcctaagtgtgattgttatgtctgcaagaactacacccgcgcttacattcggcacttgattaaagcggacgaaacgtttgggattcatttgacgagttaccataacttatacttcttgattaatttgatgcatcaagtgcaagatgccatcgaacaagataatttattggaattcagagaagcgttcttcgaagaatatggttacaatgaaaagaacactcggaatttctagtgaatcactggaagttgcttgataagtctgatagagttagtaatagacaaaattgaaaagaggttttttaaatggcaaactttgtgttaggtgccggcggttttaatcccagtttcttcgttatcttaattttaatgatggcaatgatgtatttcatggtaatgcgcccacaaaagaaacaacaacaaaaacaccaagaaatggtgaaccaaatgaaaaaaggcgacgcagtcatcacaatcggtggtttacacggtgtgattgattctgttaatacagatactaaaatcgttgtcttagattgtgacggcgtttacctcaagtttaacttgagcgcaatccggacagtaacaccaactgcttcagaagccgcaacagtggttgaagaagaaacggttgaagaaacaaaagaagatacaaaataattcagagagcgctcgattgaatacttcaaccgagcgcttttttatttgcattatatagtaaatttattatcaaatgtaggcttttaaaagataaatcgcctttaactaagaaataaaatttgtaattataatcacaaaacagtttacaaacaactcaaaatgcgctaaactaactttgttaaataaatcacaatagttaattggcatggagggaatcgatatggttaagaaagcagcagttgaaacggttgaaaacacagtgaatgaaatggtcaccgatttagtgacgcgtgcacaacgggcattagcaattttggaaacattcgatcaagccaagattgataatattgtccatcaaatggcgattgctgggttagaccaacatatggcactcgctaagatggcggttgaagaaactggccgtgggatttatgaagataaagccatcaagaatatttttgcaaccgaggaaatttggaatgcgattaaagacaataaaacagttggtgtgattgaagaagatccagaacatggcatcactaagattgcagaacccgttggtgtcattgctggtgtaacaccagtcacgaatccaacctcgacgacgatttttaaagctgagatcgcgattaaaacgcggaatccaatcatctttgctttccatcctagtgcgcaacgttgttcggctgaagcattgaatgtcattaaagctgcagcagttaaagccggtatgccagcagatgcactcttatatatcgaagaaccaagtattgcagctacccaggctttaatgaaccatgaaggggtcgcaactgttttagcaactggtggtcctgggatggtgaaagccgcttattcaactggtaaacccgcactgggggttggggctgggaatgcgccagcgtatatcgaagcttcggcgaacatcaaacaagccgtcaatgatttaatcctctcgaaatcatttgataacgggatgatttgtgcttctgaacaagccgtaattgttgatgctgaaatttatacggcagtgaagaaggaattccaagcacaaggggtttacttcgctaaaccaagcgaattatcagcactcaatgacgcagtaatcgacccagataagaatgcggtccgaccttcaattccaggccaatctgctgctaaaattgccaaactagctgggatcgatattccagaagatacgccagttttaattgctgaaattaaaggtgttggacaccaatatccactctcacatgaaaaattatcacccgtacttgcgatgattaaagctaaagatcgcgaagatggcttgcaactctgtgaagcaatgctagatcttggtggtcttgggcatacggcttcgttgcatacaacggatgaagctttaccactcgaatttgcaaaacggatgaaagcatgccgggtcttagtgaatacaccatcagcacaaggtgggattggtgatttatacaatgacatgttaccatcattaaccttaggctgtgggtcatacggccataactcaatctcccacaacgtttcaacgatcgatttgttgaacgtgaagacgctaaccaagcgccggaataacatgcaatgggtgaagttgcccagcaaaatctattttgaaaaaaattcagtcaactatttagaaaaaatggcggacttgcataaggtttttatcgtcgctgatcaagggatggtcgacttaggttacgtgcaaattgttgaagacgtcttggcgcgccgcacagatcaagtgcaggtccaagtatttgccgatgtcgagccagatccatcaaccgataccatttataaaggcgccgaagtgatgaaacgcttcaaacccgatacaattgttgctattggtgggggctcagtcatggatgcggccaaagggatgtggttattctatgattcagaagatgccgacttctttggcgctaagcaaaaattcttagatattcggaaacggacttacaagttcccaaacctcgatcggacgaaactaatctgtatcccaaccacttctggaacgggttctgaagtaacgccgtttgcggtcattactgatagtgaaacgcacatcaaatatccattggcagattatgcgttaacaccagatgtggcaattgtggatagtcaattcatcgaaagtgtgccaccccgcgtggttgcgcatactgggatggacgttttatgccacgcgactgaaagttacgtatcagcgatggcgtcaaattatacaaaagggctcagtttgcaagccattaaattagtgtttgataacttacaagcgagttatgcgggcgataagacagctaaagccaatatgcatgatgcgtcaacaatggcgggaatggcgtttgccaatgcgctattaggtatcaaccattcactggcgcacaaactgggcggcgcgttcaatttgccgcacggattgatgattgccattacaatgccgcatgtcattcgctataatgctaagacaccaacgaaacgggcactctgggctaaatacagttacttcagagcagatgaagattatgctgaaattgcacgttatctcggtttaccaggtaaaacgactgaagaactggtggccgcttacgcagatgctgtgactgcattggcggaaagtatcggcatcaagatgcgtttacgtgataatggcgtgacaaaggccgactttgatcgccacgttgatgatttagcagaactggcatatgaagataactgtacggtaaccaatccaaaagaaccattaattaaagaattgaaagggattctcgaagcagaattctagcaaattgaccaagtgatttgctagaataagtggtttgagaagcccgaccacaaatttaaggcggtagactgaaacaaatcggtctaccgcctttttttgttgctgaaaagagattaattttttactatttaagggattaaattgaagcttaatggtatgaaaattattacaaataaggcataatagaaagtagacattcatttagttcagggataactaagaaaagtttgtcgacaaacttgattaaggatctggatggcaatgacacccaataaagaagactatttaaaaattatttttgaacttggtggcgacgcaaagaaagttaccaataaggaaatactagcgggattgaacgtttcggcggcatcagtcacggaaatggtcaataagttagtgaaggaaaactacgtcaaccacacaccttaccaaggaattcaactaacaagtgaaggcgcccgcgaagcagccctattagtgcgcaatcatcggttatgggaagtttttttagtcgacaagttacattatcaattcaatacggtgcacccagaagcagaacaactcgaacatgttactaatcacgacttggctgaacggttagctgatttcttggggcatccaacgcgttgcccgcatggtgggattatacccaatgccaagggggaattcgaacaacaaagtcacatcgcacttgaaacattacaagtgggtgaaacggcgattatcgatcgcgtattggatgataatgacttattaaaatatacactggaaatcggcttgtcagtcggtgacagtgtgacgctccaaaaggttggcctcttcgaaagtccgttgactgtttttaataatacgagtcaaacagaaatccaaatcggcctcaaagcggcacaacacatctttgtgacgccacaaaattaatttatatgaaagtggtgtgagatatgcacacagatttagcagcactctttattatttttggtggttccggggacttagcccaacggaaattataccccgcattatttaatttataccggaagggttatttaaaagaacacttcgctgtcattggaacagcacggcggccatggacggatgatcattatcacgaaatcgtcatgacagctttggacaactttgatgaagatcaagcaactaaagaagctttcgtaggtcatttctattatcaatcacatgatgtgacggacgccaagcactacgaaacattaaaggctttagcaagtcagttggatgaacaatacgaattacaccaaaatcggatttattacatggccatgtcaccacggttcttcgggacaatcgcaagtcatctcggatcagaagcgctcctaacggcggatggctttaaccggttgattatcgaaaaaccatttggtcgcgattatgaaagtgctaaggcgcttaaccaagaattgacgcaaacctttgatgaagaccaaatctaccggattgatcactaccttggtaaagagatgattcaaaatatcgttgctttgcgttttgggaacggtctattgagtggtgtatggaataatcaattcattgataacgtccaaattacgttggctgaatcagtaggggttgaagaacgcgctggctattacgaaacatcgggggccttgcgcgatatgttccaaaaccatatcatgcaagtgatcggaatgcttgcaatggaagtgccggttaactttacggcagaagatgtacaacgtgaaaaaacacgtcttttcagaagtattcaaccttactcaccagcagaaatcaaacaaaactttgtgcgcgcccaatatgctgaaacatcggtggatggcgaaaacaaaccggggtatcaacaagaaaccaacgttgcgcctgattcacaaaccgaaacatttgtcgctgggaaagtgatgattgataacgaacggtggtgtggcgtaccattttacgtccggaccggtaaacgattggcacgtaaagaaacgcaaatcaatatcgtcttcaagaagactggcgtcaatatttttgctgatgataagtcagatcgttcagcaatggcacctgatgtcttaacaatctatgtcgaaccggaacaaggcttttcattaacgattaatggtaaagaagtcggtcaaggattcgccttgaaacctgatcaattggcttaccaatatgatgaacagatgttggctgacagtccagaagcttatgaacgtttgattttagaagcgctcaatggggatggcacgaacttcacacattggcatgaattagccgcttcatggcaatttgtcgatgcgattcgtgaagtctgggatgcggatcaaacgccactaccaggttactcaatcggttcaatggggcctaaagaagcaacagatttactggcaacaacaggggccgaatggatttttgatcccactcaaaataattaaattaaacaagtcagcaaagtctgtgtatgagatgctcatgccaggcttttcttattgaaagaagtacgtcatcaacgggtaacttctgagcatttacagcacttgacgaattggcgacggaatcgccgatttggcaagtgaggtaaagcggaagaagttgttgataaaagcacgttaaaggaagaagtgcgttaattcgcggttagcctttgagcatttgcctaatcagacggataagcgccaagggcgattatttggctgatgtagcaaagcacagaaggttacgaattaaaagcacgttaaagaaagaagtgcgtcaaaagcggaacaatgtgcctgaaaaagcatgttgaaaaaattaaggaggggtaacatggcagagctgttcaagattccattagaaaatgatacgagtcgcaaaatcattcacattgatatggacgcgttttacgcatcgattgaagagcgtgaacagcccgacttacgccaaaagcccctcgtgattgcccgtaatccgagtgatactggtggcaaaggggtcgtgacgaccgcgaactatgttgcccgacaatacggtgtgcactcggcgatgagtgcgcaaaaagcagctgaactgattccgaatcaccaagccgtttttaaggcgcccaattttccgctttatcaatcggtctcggaacagattcacacgatttttcatacggtaaccgataagattgaaccgattgcttttgatgaagcgtaccttgatgtcacggaaaataaactcggcttggcacacacaattgatgtggtcgcctacattcaaaaagaaatccttaaagaaacccaactcgtcagctcggcggggatttcgtacaataaatttttagcaaagatggcatcggattaccgcaagccagcggggcggacactcgttttgccggaacaagcgattgcctttttaagtcgcttgccaattgaaaaattccgtggggtcggtaagaaaacggcgccgcgaatgcaagaactcgggattttaacgggggcggacttgcttgaacaatcagaaatgatgctgatgcaaaatttcggcaagcttggctacggcttatatcggcacgtgcgcggcatcgataatcgcccggtcgcctaccaacgtgaacgcaaatcaattggcaatgagaatacttacgggcaacccctaatcagtgaagagcaggtgcaagttgagttgaagaagttagcgattgaacttgaacggcgtttacgcaagaatcaaaaacacggtttgacagttgttttaaaagtgcggaatcgccaatttgaaactattactaagcgtaaaacatttaacgaatatgtcggcaaggcagctgaactcgaggcgatcgcttgggaaatttggcaaaccatcggccatgcagaagatggcgtgcgcttgctcgggattacggtgactaacttggcaccgcaaacatttgaaaacatcacgttaccgttatacgattgggagcgtgaatagttgagtttcctttgtttttgtgcgctaaaaccgatatactattaataactatgtaaatctgataaagggtggtggcgttgagtggcaactaagcatgatcaaattttaatgtacatcgaaaatttaccaattggtgacaagatttcggtgcgctcaattgccaaaacactctcggtaagtgaaggaacggcttatcgcgcaattaaagcggcagaaaataacggcctggtcagcacaattgaacgggtcggtaccatccgcattgaacagaagttaaaggggaagattgaaaatctgacctttgaagaaatcgttcaagtgattgacggcgaggtccttggtggccgcgctggtttagacaagttgttggacaaatttgtgattggcgcgatgcaaatcgatgccatcacgcgctacattacgccaaagtcattgatgattgttggtgatcggacggatgtgcaacgcttagcacttgaaaacggggccgctgttttgattaccggcggttttggcacttcggcggacgtcattgcattggccaacgacttggctttaccgattttgcaaactgcctacgatacctattcggtggcggcattgattaatcgggcgttgaccgatcaattgattaaaaaagaaatcataacggtggctgatatctaccacccacttgctgaaatccacacgttacatgctaatcaaacggtagccgactacaagcaattgagtgcggcggtaaaacaatcgcgttttccagtcgtcaacgaacatatgcgcctcgttgggattgtgacggtgaaggatattttagataaaccggccacgatgaccttggataaagtcatgaccaaggaacccgcgagcgttaaaaaatacatgagtgttgccagtgtcggccattcaatgacttggaatagtttagaagtgatgccagtggtggcggacaatttagaactagaagggttaattacccggcaagatgtcatgagcaacatgcaaacggcgcaacgccaaccgcaagtcgccgagacgttttatgatcagattgtcgaaccactgcgtcctagtgaaactgtcccagacttttatacggcggcatatgaatatgaagtgacgccccagatgacgaataacttagggacaatttcgtttggtgtactgaccgaagcggtttcggcagcttgtcaacaaatgctccagacgcaacatcagcgctattcaatgattgaacagatcaacctccattatttacggttgattcaaatcgacacgcagattcagattttaccacgcttgctcgaaattggacggcgttcagctaaaatcgatgtcgatgtttacgccaatcatgtgattgtggctaaggccctcgtcactggtcaactcttagaaagaggttaataaatgacaactccagaacaaattattgctaaaattgaaacttacgatacgattatcatccatcgtcatgtcaatcctgatcctgatgcgattggctcacaagttggcttagctgaagtactgcgtaacagctacccagacaagacgatttaccaagtcgggagcgacaccggtaacttggcatggctcgcaaacgttcaagaaattgaaccggctgcttatcaaggtgcattagtgattgtgactgatacagccaactcacctcggattagtggtgagacgtttaacttaggcgctgaattaatcaaaattgatcatcatcccaacgatgatccttatggggatttaaactgggtgttacctgatgcctcaagtacctcagaaatcattattgacatcgtcaataacagcgaaggccacttacaattcaatcaagcagctgcgcgtgttttatatgccgggattgttggtgatacggggcgcttcatgtttaattcaaccagtccacataccatggaatgtgccgcccaaatgatgacgtttgatattcaccatgataagctcaatcaaaagatgaacgaaatcacgttggaacaagccaaattacaagggtacttattcgatcaacttcaagtgaacgaccaacaagtcgcctacttagtggttgatcgcgcaacccaggaccggttacatgttgaaccgcaacaagtacactcgattgttggaacacccggtcgtttgaaaggggtattaacgtgggtcatcttcgtgcaacaagcagatgacacttaccgtgtgcatttccgctcaaagggcccaatcattaatgaactagcgaagcaacatgatggcggtggtcatccactcgctagtggcgctaaggcagctgatcaagctgaaatcgacataattattgcagaattatcagcgctagccgcgcagtacactgaatagacgcagatccagatttaccggattcaaacaatagaaagcaggactttatggataatcaatttacacaatttaatctaaaacccgaaattattgcggctttagacgacatgcactttacaaaacccacggcggttcaacggcgtgtgattccagccatcaacgctggtaaaagtgttatcggtcaatcacaaacggggagtgggaaaacccacgcgttcttattaccccttttaaataaactggtgcctgaaaaagacgaagttcaaatcgtcatcacagccccaagtcgcgaattggcttaccaaatctatacggctgccgaattaatcactcaacacatgacgggggatattcggattggtcgttatgttggtgggactgacaagcaacgccaaatcgaaaaactcgaacaacatcaaccacagattgtgattgggactcctggtcgaattttagatttaatcaagagcaaggcgcttaagatttatacagcgaagatcttggtcatcgatgaagcggatatgacacttgacatgggctttttgaagccagttgatgacatcgctagtcgtttgccagaagacttacaaatgatggtcttctcagcaaccattcctgataagttacaacccttcttacaaaaatacatgcacaatcctgtgattgaagaagttaaaaacgaaactgtgattagcccaacaatcgacaactggttagtgccaacgaaggggaaagccctcaaccaaaccatttattcattattgacgatgggccatcctttcatggtcttggttttcgctaatacgaagagcaaggttgatgacatccaccgttatttacaatcacaaggcttgaaagtcgctaaaattcatggcgatattccaccacgccaacgtaaacggattatgaaagaaattcataacttagactatcaatatgttgtggcaactgatttagcggcccgcggtattgatatcgaagggattagcatggtcattaatgctgaagtcccacgtgaagatttagaattcttcattcaccgggttggtcggactggtcggaatggtcttaaaggaaccgcgattacgctttatggtccagatgatgaacaagccgttgcacaaattgaagcaatgggcatcaagttcacaccaaagacatttaaagatggcgaattggtcacatcatatgatcggaaccgtcgtaaaaaacgggtagctaccacgcatgaattagatgtcggcatgaaagggatggtcaaaaaggccaaacttaaacgcaaacccggttataagaaaaagattaaagcagccattaaacaagatgcacaaaagaaacgccggattgaacaacgacttgaattacgtgaaaagaaacgtcaaaacaagaagcaaaatagctagttaattcataatcgaggtggctgtgatgcatgaaaatgacttacaattactgaactggttatcgttatccgaagaagcacggcgcgctaattttggccaggtgttgcgctactttgttagcccgctgattccaattgaagcgattcagagtgagaccgcaacgattggcactcaagtatttcaaacttacagtgcccggctagctgggcagcagtttatttttatccccggccaagctaatgtgcagttgggatggcaagcaggggcagcccacttagcaccgagtgagtggtttgcacaaactaaacgtacgttaccagttgatcaaggactcgtttgggcgacgcaagcggatgtcgatcaatacgttgatcagatgacatcagaatatcggattgttaatatggcaccgatgttagtggcacaaacaccaatttcaagtgagtgggtactccaaggcgagtatgaaacgacaacaggacgttttaatggaaaccaactagttgggcgtcagtttttggcggaaatccaaaataccttgtttcgggcgcggcgggaacaaaattcagctgaaacacttgaaagtgcgcacctaattttacaagcgggtgggcgaccagattgttaccaagtgtttgaaaaaactaatggtgacgaaagtgaactacgccagacattgcggcggcgcggttttgatctggtgagtgttgatcagtatgaatggcttaaaggtgcagggagtaagacgttgtggttaagtggtaatcacttaccacgaccgactcagcgccagcagatgccatttgggttacaagcaacagccgctgacggttatgaacttactcaagatccacttgtttataagggtggtgcttgtgtgacagggggacggtatagtttggaacaatggttgcctgaagcacccgcctatgaatctgggattcaaacggcggcattgggcaatccgacgcttcagtgctactatcggcctgcgattaccgttaccttggattagttgacaattcagcaaatcttttttatactttggaagtgttgggatatacgcaacgaactgacggagacaggaacgcctttctagactgagagaaggtgccgccattggttgacgtgctccccaacatcacaaacaattcaataaactcataaagaggttaacgactaacatcgttgcaatcaaggtggtaccgcgcttttgcgtccttgaaattgcagcggtgttttatttttttgaaggagcaaacatgatgaaaaaactaaccagtgcgcaagtgcgccaaatgttcttagatttctttaaagaaaagggtcatgatgtcgaaccaagtgcatcgcttgtcccagatgatgatccgacattattatggattaactcaggggttgcgaccctaaagaagtatttcgatggtcgcattgtacctaataatccacggattaccaatgcacaaaagagtattcggaccaacgatattgaaaatgttgggaagactgctcgtcaccatactttcttcgaaatgctcggcaacttttctgtcggggactatttcaaagaagatgcgattccatgggcttgggaattcttaaccagcgacaagtggattggtttcgatcctgaaaaattatacgtgacggtttatcctaaagatcaagatgcgcaccggatttggcatgaaaaagtcggtttgccagaatcacacatcattgaagttgaagataatttctgggatatcggtgaaggcccctgtggccccgattcagaaattttctacgatcgtggtcaaagcttcaacaacgttagcgaagatgatcctgaaaactatcctggtggcgaaaacgaacgttatctggaagtttggaacatcgtgttctcagaattcaaccatttaccaaacggcgaatatgttgaacaaccccacaagaacattgatacggggatgggcctcgaacgacttgtttcagtgattcaagaagccccaaccaactttgaaacagatttattcatgccattgatcgaagcgacagctaagatgagtgaccacaaacaatacggtcaaaatgcagctgatgatatttcattcaagattatcgcagatcatgcgcgggctgtgacgtttgcaattggtgacggtgcaatgccggccaatgaaggtcgcggctatgtactccgccgtttaattcgtcgggccatcttaaatggtaagaaactcggcatcaacgacgctttcatgtacaagttagtaccaatcgttggtgaaatcatgcaaagctattacccagacgtattagcacaaaaagaattcatcgaaaaagtcatccgttctgaagaagatcgtttccgtgaaaccttgaatgatggtttacgtttattgaaccaaacgattgacagtgtcaaagctgctggtcaaagtgaaattgctggggcagatgctttcaagttatttgatacgtatggtttcccaatcgaattgacaactgaatatgccgaagatgaaggcttaacggttgatcaagctggtttcgaaagtgaaatggcacaacaaaaatcacgtgcacgtaatgcccgtagtgatgaacaatcaatggggatgcaaaacgaacttttaatggatatcaaagtggaaagtaccttcactggttatacaacgcttgaaacagaaagtaagttaagcgtcatcttacaagataatgccgaacaacaaacgattaagagtggtacggcgcaattaatctttgaccaaacaccattctatgctgaaatggggggccaagttgctgatcaagggatcattaagaacctagctgggcaagtagtcgctaaagtgactgacgtgcaatacgcaccaaacgggcaaccattacacaccgttgaagtgctcgaagaaatgattagtggtgtccactatgtcttatcagttgatccaaccttccgcggtggcgtcattaagaatcacaccgcaacgcatttattggatcaagccttgcgtgatgttttaggcgaacatacgcatcaagctggttcattggttgaacctgactacttacggtttgattttacgaacctcggtcaagtcacaccagatcaattagccactgtggaaaaaattgtgaacgaaaaaatttgggctgcactacctgtgaatactgttgaaaccgatattgaaacagctaaacaaatgggggccatcgcactctttaccgaaaaatatggtaagacagtccgagtggttcaaatcggtgattactcaatggaactttgtggtgggacgcatgctgctaacactgctgatcttggtctattcaagattacgagcgaatctgggattggtgccgggacgcgccggattgaagccgtgacttcaaaggcagccttcaagtatttgaatgacaaacaagccttattaaatgaattagctggtgaattgaaagttgctcaaaccaaggatttacctaagaagattcaacaattacaatctgacttaaaagcagaacaaaaagaaaacgaacaactcaaagcaaaatttgcccaacaacaagctggcaatgtttttgaaaatgtcgaaacagttggtcaatggcgcttagtggctgctgatgcaaaagttgccggaatgaacgaattacgacaattagcggatcaatggcaacaaaaacaaatttcagatgtcttagtgctcgcaacagttgcgggagataaggttagcttgattgtcgcggtcgcacctgatgcgattaaagcggggattaaagccggtgatttgattaaacaaatcgcaccactcgttggtggtggcggtggtggccgtccagacatggcccaagctggtgggaagaatccagctgggatcgcagatgctttggcagctgctaaaacagctttagcgaacgcttaacttataacgggattgtcgtcaattttttattgattgcaatcccgttatttttttgttctttttgttaatcaatttagcgaaatgtgttatagttatctctcatccgcattctgctaagagaggggagagttgtactttgtcctgttttcgagtagaatatggttgtataagtagcgaaaagttgaggtgttgagagatgaatctagataaaacagtccattttgattttggtaaaaatagccccaagaatgttcatgaaacattaacgacggtctatcagacattagaagagaagggctacaacccaattaatcagattgtaggttatctgttgtccggtgatccagcatacattccgcgctataatgatgctcgtaatttaattcgcaagcacgaacgtgatgagattatcgaggaattagttaaaaattatttggataaggaaacgacgaaataatgcgcttaatgggatttgatgtaggatcaagaacggttggcattgcgattagtgatctattgggctggacagctcaaggggtcgagattattcgcatcaatgaagatgaatcagaatttgggttagaccgcgtcaaggaattggttgcagaacatcaagtgactggttttgttttggggttacccaagaatatgaataattcgattgggccacgggcgcttaaagcgcaagaatacggggcaatgctgagtgaacttttcccagagattccggttgattacatcgatgaacgcctaacaacggttcaggctgaacgcatgttagtggaacaagcagatacgtcacgtaagaaacggaagcaagtgattgataagcttgctgcggtgatgattttgcagaactacttggacgcgcacggtcgcttaacacaaggctaataaataaaacaattaaggagttttgatgaatgactgaagataacaagaacatccaccaagatgaagaacaacaaattacactaatcgacgaccaaggtaacgaggaattataccaagtgctctttacatttgattcagaagattacggtaaatcatacgtgctattgtacccaacaagcgctgaagaagatgaagaagttgatatccaagctttctcattcacatcagacgatgcaggcgatgccagcaaaggtgacctattcccaatcgaagacgacgaagaatgggaaatggttgaagaagtactaaacacatttttggcagacgacaacatgaaataagtgcgttcaaaccggttatactttgaggactagcatagtcccgtgaatgagcgacgaagtcgatcgtttgcgggacgtagctagccgcagaagtatggtttgaaaagtacgttaaagaaaagaagagcgtcatcaacggggaacttctgagcatttgcctaacttagcgaattggcgatgcaatcgccgatttgataagtgtagcaaagcacaggaagttgttgatgaaagcacgttatcaccatctatttcaaaaagggtcccgatagcaattaattaaattgcagtcgggaccctttttttatgtggagaaggtgtgggttgaaatgtgctttttaaagctgactcttgtgcttagcttcgtatcgcaaacgaccgactttgtcggtcattcacaacactgtgctaatgctcagagtcaacccgctttaaacgcactttaaacgtgctcttacaggcatatttctgcgcttaactaaatttgccaaatcagcgattacatcgccaattcgtcaaatccagttaatgctcaaaatatcaccgcctgtagtcgcactctataacaatttcttcgctttttccgtgttaataaaatgcaatttagcgaattcgcctaggtaatcgatgccaccttgtgcgagtaaatctgcggcgatttggttaactgcttgatgattgccgagcggaatttggcggcccgcttttttagacagttcaagcattgataggttggcttggtggcgcgcaatgattgaagcggcagcaacggcgaggtgaaattgttccgccttggttgagaaataaacgttctcgcgtaaaacaaccggttcattcttcaaatagttgtagtaaatgccgcgtggttcgaattgatcaatgaggatgccagcgggtttttcgggttggattttttggaggactttgaggagtgcgaaattatggctgatggccttcattttttcgatgttcattgtggcgtgtacttcattgtatttcggtggcatgatgttgacgatgtgataggggagtttagccatcatcttgattgccatctgatcgatttgtgcatcggttagcgttttggaatccgcgacacctaggctattgacgaacgccagattttcttggctgacatagacggcggcgatggtcagcggaccgaagtagcttccgttaccaacttcatctgagcctaaaacggaccatttggcaaaatcagctggtaaaacatcgcctttggcggctttaggcttagtacggctagcagattttgctttgctaggggtagcggtgccccacttagcagcttctcgttcggcactagcgccttggaaaagtactttgccagatttatagccggtaatgcttagtccattggcttggtgcgcaaaaacggcccccggcggtagttgacggttggtcggataatttttttgaatagtagttaattgtgagggtgtcactttaatgactgcttgcatacgattggctccttaatgagtggcaaatgaagagattcggagtaaaattgccactttcccttatttcatgataaaatagttcagttgaactagcaaataaaattagagtgcgactgcagatggtcatactctgaggattagtagcataccgtgaatgaccggcaaggccgatcgtttgcggtatgaaactaaccggaagagtatatctgcaggagcacgttaaaaaaagagtgcgacagcaggcggttatattttgagtattaactggatttgacaaattggcgatgcaatcgccgatttggcaaatttggttaagcgcagaaatatgcctgcaagagcacgtttcaaaaatcagagtgcgcaataagctgggtatcttctgaggattagcatagactcgtgaataagcgacgaagtcgattgtttgcgaggcgtagctaaccggaagaagatggcttatggagcacgtttcagaatactttatccaatcaatcatacacacatccacgccacaaaacgcgtatctaaggggaactcatgttaagtctaattattatcttaatgctgttatatgccatttacacaggggtcagacgggggtttatcatgcaagccgtctacacgattggctactttatcgtcttttggattgccaaagcgatgagccaaacactagggcctaagctaagtttaatggtgccatacccatcggcaactgaagacagctattttgcatttttccaaaagagtatcgggttgtcactcgatgatgcgttttatatcggcgtcgcctttgtcctcgtgatgtttatcggtggcttgttggtgcgcttcatcggactattgttgaattcattgacttatatgccaggtttgaagcaatttaacaaggcagccggtgggctcttgagtttcttggtcgtttacgtggggctctttttgctcctctacgtgctggctttagtgccagtcgatggcttacagaagacattggaaaactcgacagttgcgcgcgtcattgtcttacacacaccagtcctcacctctcaagtgacgagctggtggattgctggctaaaatggatagtgcagttggggctgacggaagtcgccccttttttagaaggagttaacttaaatgaatcataaaatattacaaacactagaatacgataaaattaaacaaatgcttcaaggccatgccatcacggcgtttggtcaagaacaaatcacacaattaacccccgctaacgatgcggaattgattcaagaacgcttggaccagaccaaagatggggtcgatattgaacggctaaaaggtggcattcctttgccacagttagataatattcgtccgcacttgaaacgaatcgaaatcggtgcgactttaaacggtaccgaactcgcgcaagttgggcgggttttgcgcgcgacttctgcggttgtgcgtttctttgatgacttagaaaaagatgaattaaccttaaaggcgttgccagacttagttgcccaattggtgactttaccacaactaactgaaaagattagaagttctgttgctgatgatggcgccgttttagacacggcttcaaccaagttgcgtggcttacggactggtttaaaacaattggaaggccaaatcagatcgcggatggcaagttatacacacggtgctaaagctaaatatctgagtgatccgattgtcacgattcgaaatgaccgctatgtcattcctgttaaacaagaataccgtggccaattcggcggcgttgtgcatgatcagagtgctagtggtcagacccttttcatggaaccacaagccatcatggaattgaataaccgcttgcgccaattacaaattgaagaacaacaagaaattgaacggattttggcggaattatcggaagccatcatgccagaacgccacaatattttagccaacgctgaattattggggcaactcgatttcgtcaatgctaaggctcaacttgctaaagcgttggaggccactgaaccgctgattaatttagaaaaccatgttgaactcaaacaagcacggcacccattaatcgacccagctaaagtcgttgctaatgacatcgcgattggggcggattatcaggccatcgttgttacgggtcccaataccggtgggaaaaccattacgttgaaaaccttaggcttagtccaagtgatggcccaatctggcttatttatcactgcgcgtgaggagagccaagtcggcgtcttctcggatatttttgctgatattggtgatgaacaatcaattgaacagaacttgagtacgttctcagcacatatggaaaacatcattcagattctccaacatatcgacgatcgtagtttggtcttgctcgatgaattgggggcagggactgatccacaagaaggggccgctttagccatcgctatcttggatcaaattgggattgttggcgctgatgtcgttgcctcaacccattatccagaattgaaaatttacggttacaatcggccacaaacgattaatgctagcatggaattcgatgtggctaccttacaaccaacgtaccgtttattaattggggtgcctggtcgtagtaacgcgttcgatatttcaacgcgcttagggttaccaagctcaatcgttcaacaagctaaacaattgatgaacgatgaaagccaagatttaaataatatgattaccgatctcgaaaatcaacgtaaggcagccgaaacggaataccaagctttgcggcatgaattagcagaagcgactgacttgcatcaacagttatcaactgcttatcaacaattcttcgaagaccgtgaaacagaaatgacgaaggcgaaagaaaaagcgaatgcgatcgtcgaaaaagctgaagttaaagcagacaaagtgattaccaagttgcgggatatgcagatgaatcaaggcgcccagattaaggaaaatcaattaatcgatgcgaagtcggaattagggcaattgcaccaagaaacaaccttgaagaaaaacaaagtattgcaacgggcaaaacgacgtcaaacccttaaagaaggcgatgatgttttagttacttcatacggtcaacgtgggacattagtccggcaaatcgatgccaagaactgggaagttcaaatgggcattatcaagatgaagattgctaacgaagaccttgagaaacaaaaagtcgttgaagataaccgacctcaacggcatgtgacaactgtcaacagcggtggagcgcggtatgttaaagcccaacttgatttgcggggcaaacgctacgaagaagcaatggctgaagttgatcaatatgtcgatgcggccttgttagcgaactaccaacaagtgacaatcgtccatggaaaaggcaccggtgcaatccgccaaggtgtccaggactacctaaaaggcaatcgccaagtcaagaaatacgaatacgccccagcaaacgcaggcggcaatggcgcaacaatcgtaacattcaaatagagtgcggaagcaggcggttatacgccgaggattagcataggcagacgaatgaccaacttgttggtcgtttggctggtgtagctaaccggaggagtttgcctgctggagcacgtttacgcccccaatccaaccagtcctttctggttttgattgggggtgtttttttaggcttgttaaattaaacggggataaaataatccgtttgtaacgaataataagcgagttaagttgttatttacgccatataggagtatcatgataaataatatgttttgtacaattgaatggagggcgaagaataatggttgaagtattaacagataaaaattacgaagaagaaacaaagagtggcgttgtcttgacagacttctgggcaacttggtgtggtccttgtcggatgcaatcacctgttatcgaatcattggcagaaactaacgacaaagttaagttcagtaaaatggatgtggatgctaatccagaaacgcctgctaatttcggaattatggcgattccaacgttagtggttaaaaaagatggtcaagttgttgaaaaaattactggcttccataataaggaacaactagaaacgattttggcacaatataccgactaattatgaaaacacctactatttagtaggtgctttttttatgtgacagcgtgtgacaaaaatgttagtggttgtttaataaacgttgtggtaactttaatgatgaacaaaatgatgaaaatcaaaaagagagagaaagagatggtgaaaaaatgggtcaaaaaatacttaatttttggaataaaccggccgtcaatttcattggcaaaaccataatttattttgttattctgctaattctactttatttatatgattacagtggtatcggtagtcctaaatttatctacaatgaattctaatgaaggagcgtcgttaaaatgaaaaagaatatcattcaacaaattgatgcgattgcaattgaccaaccacaaactgtggcttatcaattaggcacgacgcaacacacttacgccgacttaaaggctgcttcagaccggattgctcatttcattcaaagccaagacttgccagctaaagcaccggtgattatcttcggtggtcaaaacttcgagatggtagcaacttttctaggtgctgttaaagcaggccatgcttatattccggtggaacaacattcagatccagcgcggattaaacagattgaatcagtcgcaacgccggctactgtcctatcatgggctggtgaaacagcgattgatgttaatatgcccgttttcgcagaacctcaattgacagatgtgattgcaaacggagcaaccgattatgatgctagccaaagtgtgcaagggaatgagaatttctatatcatcttcacgtcagggacaacagggttacctaaaggcgttcaaatcagcgaaagcaatttacaaagtttcgttgactgggccaacccagctttcaatgttgcggataacagccgcgttttaattcaagccccatactcattcgatttatcagtcatggatttatttcccgggttatgctcaggtgcaaccctcgtcgttttagaaaaagctgtgacggacaacttcaagacgttatttgaagtcttgccaactcttaaggtgaacgaatgggtttcaacaccatcttttgcagaaatctgcttattatcaccaacatttgatagtgaacatttcccagaattaaaacaattcgtcttctgtggggaagaattaacgcatcaaacagcaacaaagttaatcgaacgtttcggtgatgcgcaaatcttcaacacatacggcccaactgaagcgaccgttgcgatgacgagcatcgaaattacggcggaggtcttagcgacttacgaccgactcccaatcggctacacaaaggctgatactcaaactgtcgtagtggacgaacagaataatccagtcgcagttggtcaacctggtgaactcttaatcagtggcccaagtgtttcaaaagggtacttgaataatcctgaaaaaacagctgcagccttcttcgaaaaagacgggcaacgcttctaccattcaggcgatttggtcacccaaaacgaagatggcttgctcttttataaagggcggaccgacttccaagttaagatgcacggttaccggattgaactagaggaaatcgaccaccacttaagccaattagcagccgttcatcaagcatgtaccgtaccgcgctacaacaaagcccatcaagtcacccaattgattgcctatgttgtgccagcagacggtcaagaagcgggcaatgatttaacgaagacgttaaaagcagaactcgctgaaaatacgatggactacatgattccgcaacgatttgtttatcaagaaaaattaccattatccgtcaatgggaagattgatcgtaaagcgttgattaaagaggttaatggcaatgcctaatttacaaccgtacgcgaatccgaactactttctcattctaggtgcggcgttaattccgttagtgattggcttacttaacggcaaacgttggcatgtttatgagacacttgtctcactgctctttttgatcctaatctttgacggggataaggttcaccagggaattgccttgattggttacgtcctgttcgaaggagcactgatttggggatacactgtctatcgtcaaaagcacaataacacctggctattcgatctggctgttatcttagcgattatgccgctagtgattgtcaagttcgtgccattcttaaatccgggtagtaattcaattcttggcttcttggggatcagttatctgacatttaagtcagttgggatgattatggaaacccgtgatggcagtattaagaaatttgaaccatggttattcttacaatttatgctatttttcccgacgatttcatcaggaccaattgaccgttatcgtcgtttcaaaaaagattacctaaaagttcctgatcgtgaccattatctcgacttactgggcaaggcagtccacaacttcatgttgggctttgtgtataagtttatgctcggttacttattcgggaccgtgttactccctaaagttgcgcatttagcaatggcgagtcgcggtgggttccttgatatctcatgggggcttgttggttacatgtatgtttacagtatgtatttattcttcgattttgcgggctacagtttattcgctgttgcaacaagttatgtgatgggtgttgaaacgccaattaactttaacaagccatttgcatcaaccaatatcaaggaattctggaatagatggcatatgacattatcattctggtttagagattacatctacatgcgcttagtgttcttcttgatgaaacataagattaccaagaacaaggtcctcattgccaatctcggctatttaacactcttcttattgatgggcttctggcatgggttgacatggtactacattgtttacggcttgttccacgccatctggatcatccttaccgatgtctggttgcgtttcaagaagaaacacaaggatcacattatcagcaatcggtggacgaactacttagcaatttttgcaacgtttaacaccgtttgtctcagttttctaattttctcaggctttttggaccggttatggttccactaagacctacacactaaaggagcgatttaatcatggacgtagaaaatacagtagtagaaattttagcagatttaacagggaacgacgatattaaagacgatatggatatggaattattcgaatcagggacattagattcaatggcaactgtgcaaatgttacttgaattacaaggccaattagatattgaagtacctgtttcagaattcgatcgtgaagcatggtcaacacctaacaagatcattgctcgcgtaaaggaattgcaataaaatgtttaaacgtttatggcaaattttcggcccggttttagtggccggtctctgcttaacagccttattactatcacctcttcgattaggacgacctagcgaaaagacgttgtcgacagcggcgacgtcattatccgccaatgtgctaaaaggggaagccatcaaagatgctgcatttaacgacaactacattccgatgattggttcatccgaactatcccgaatggacgcgttacatccatctgttatggcaaacaagtatgattggcaaaataagccattcctactaggggcaccagggactcagtcattgacccactttttatcacttcaagcgactggtaatcacttgaacggtaaaaaggccgtcgtcgttatttcgccacaatggtttgtaccacaaggggtaaaacctgagatgttcgatttcttctattcaccactacaaaccagttatttcttaatccacgcgaaggattctgaaagtacgcggtatgcagcgaaacgaattctagaactcacaagtgatacaaccaacggggtaatgcgggatgcattgaagaacaaagctttaggcatacctttaacggagacgcaaaaagtatacattaataatgtgaaacgcccagcgttacaacatcaagatcaactcttcagccaattattcattcggggtcgtgaacgcgaattgcgtaaaggcttgaaggtgttaccaaaacaacctgataacatgcaacttgatcaagtcgcaacggaattaggacaaaaagtaacgggtgataatccgtttggcattcaaaatagtttttacaaaaaacgggttaaacccaatgttggtaaattgaagggtgaacaaagtcactttaactatgaaagttcacctgagtttgctgatttccaattgatgttagattacttcgcagcccataaagtatctgttcaattcatcattccacccgttaatgcgcgttgggccgcttatacagggctctcacaagcgatgttgaatcgttttgataagaagattcaatatcaattgagaacgcaaggcttcaacaacattgttgatatgactaacgacggtaatgaacaattcttcatgcaagatacgattcatcttggctggcgtggctggttgaaagttgatcaaaaactccaaccattcatgagaacgaaaaaagcaaaaacagtgcactatgacatgtcaaacgacttcttaagtcgcgactggcaaaacgtcagcggcaataacgtccatgactttgattagagtgagacagagccggttatcacttgaggattaacacgtttaatatgctaagtattcaaaaagggtaggaacaaaatttaattttgttcctaccctttttttatagcacatgcttatctgtgttttctatgcatttctcgtcgacttggtaagtctgccacgcgggttcttgtgtagtgtggtgtttcttcagaagttggcttgttttctggttccaccggttcaggaacaactggtgtttctggaacggattctggttctagtgtgggagcagccacttcttcaggggctgcttcaacaggttgtgtcatcacaggtgctggttcttcttcaacagattctgattcacttggtacagatgcgacttgtgatgcatcaaccgttaaatgaatggcttcgactgcttcgtcttcaattggtgcttttgaatctgtttggacgaaaatcgttacgttttttttattttcaatggttgctttggcttcagtcacaatccgcaattgttgttcgaggatttgggcaacgaagccggcttctaattggaagtcaggagtatcgaaatccgcaatccgtgaagcgacaatcgggcctgttaattcgaagaagtattgttccttcttctgtttcttaagactgagatggccgaagttgatttgttcgaagaaggcacagaggtcttcgaaagaatcgagtgggaattgcaaagcgagttgcttaccggcccaatagctgatggcgtcattttcggccccaagaattgatggtaacaagatatcccgtaatgttgcctgtgtcagatatgatgcagtttgtggattttgggcgagttgttcatagcgtgattgagtcacagtggcactcctttatggttcgttttttataagtactcctattataccgcgaaaactctttattttttataaaaattaacgccaactgtgaattgccggccgtgcccgttgttttagttgaattttgcaccgaaaaaagagaaaatagaagttacgagtgtatcctgaaatgaaaagagaaatctaatatgcaaaaacaacccattggttttatggattcaggtgtggggggcctaaccctcttaaaagaggcgcttaaacgtctacccaacgaagacatggtctttatcggggatcaagcgcgcctaccatatggtgaaaagccggcggaaaccgtgcgcaaatttgcgtggcagatgaccaattttctacgggggcaaaatattaaagcattggttgtcgcctgtaataccgcaacggcggccgccttacctgatttacaagcgcaattgacgattcctgtaatcggtgtgattgcaccaggtagccaagcggcattggcaacgacccgtaatcggcatgtcggggtaattgccacgaccggaacgattaacagtggcgcatatgcctatcaactaaaggcactcaaaccggcgacacacgtcacgagtttggctgcgccaacttttgtaccgatgattgaagcaaaccaattgagtggcgaaactgtgcaaaacacggttgacgaaaccctcgcgccattaagcgggacgggaattgatacgctaattctcggctgtacccacttcccattattaaccgcggcgattcaaaagacagttggaccggcagtcacgctggttgaccccgcgcatgccgctgttgatagtttgattcaggcattacaagatcgcaatcagttggtggccgatgcaacagctgggcaactacacacctatacgaccggatctgtaaccaatttcgaagcaatcgcgcgtcaatggttagcaatcccaacccttgaagcccaacaagttatcattaaggaggaaaaaaacgatggtccgaatgaataatcgtgctgataatgatttacggccagtgcaagtcacttggcgttttctaaagcaacaacccgcttctgttctatggcaacgcggtgataccaaagtgctcgctgctgttcaacctacagaaggttccttgcaagtcaatggcaatggcataacagcgcaccaattagaatggttgcaaacgacattacgccccttattggcaaccgaagcactcactatcaccgtaacctgtcttgaagatggtggcggcttattagcagaactcttcaacgctgtttattgcgcactaaccttattaccaaaaggcaaaggccccaaacaagtcgctgcagccgtcacagcagcgatggtcgctggtgagtcactcggtgacccagacgccgcggaaagcgacctagcgactagcttggtgacgatggtggccacaccgcaggaacaaatcatcgcccttgaactcggcggacaacaagcagtcaatagtagtgaattcaacgaacttattttacgtgcgagccaaggtgtgacgcgaaccaatgatcaacgtcaagccagttttgaacgcgccgttcaaccgaatatccaagtggctgataccgatgaacaaacaatcgtgattgccacgaagaatccaggtaaggcccgcgaattcgaatccgtcttcgcagcggaagggattcaaatcaaaacattattagattacccagaattgccaaacattgatgaaactggttcgacatttgaagaaaatgctcgcctaaaggcggatcaaattgcagcgatcttacacttacctgtcttggcagatgattctggtctaatggttgatgaactaggtggtcgtccaggaatttattctgcacgcttctctggtgatcataacgatgccggcaacaacgcgaagttgctctatgaattaacgggtgtgcctgctgaaaagcggaccgcaaccttccatacaacattggtttttgctaaaccagaccgaccagatgaagatttagtcgttgaaggtaacgtgaagggccaaattctaggtattcctcgtggggataacggcttcggctatgacccacttttctacgtgccagaattagatgcaacgatggcccaactcacggtggaacaaaaaaataaaatcagccaccgcgcaaaagcaattgagaacctagaagataaatggaaagaatggatcaaaaactagcgtgcgacggcaggatcacgtttagatttggctgatgtagctagccggaagaatatgtcggaagaagcacgtttcaaaaaaacaacgccccttggcgccgaaaggactgtttagtatgcgttttgttgttgtgagtgatagtcatggtgatcgcgatattctcgtgcagttagtggcgcagtatcaagatcaaccagtaaccatgttacattgcggggattctgaattaacaaccgatgatcccttgtttaaccaaatgaccgttgtgcaaggcaatatggatttcaatggtcaatttccagcacaagttgttgtcccagttgcaaatgaacgaatcttcttaacgcacgggcacttgtatggtgtaaatggcgatttaatgcggcttttattagcggcccaagaaagccaagctaatctcgcgttctatgggcatacacaccaattggcctgtgaaatgcacgaaggtgtgctgctcttgaaccctggcagcattgcccaactacgggggcagtttcgtgacttgaaagggacatacgccgttgtagacgtcacacctgaccaatatcaaatccagtactacaatcgtcggttcgaacccgtttcgcagttacactttacatttaaacgcgcctaattctaaagactatccaaagtttagtagctatggatggtcttttatgtttgctctttgttacaatctaaaagtagcattagtttattggaggccaagtgatgatttcagatgcattttcgaacttattattagaaaataaagaacacttcttaattcccggtgaggttgttgcgagtgttcaagaaagcaactccttggaacatgcgtttattctactaaccacggtgaaatattcgagcattcccgtcttagacaaccattcgaagttcaaagggatgttgacgatgccgttaattaccgagacgatgctcggattgaataacctcagtttcgaaaatttgcggaagctgaccgttaaagatgtcatgcaaaccgatgtcgtgacgattagagatccatatgatattgaagaaacgctccatctcttagttgatcacccctatctgcctgtgatttcggatgaaggggagttcacagggattgttacccggcgcgaaatgatgaaaagcttcaaccgagtagcccataatatcgaaaaagaataccaaatcgagccaataaccgcagaaacaacccaaaaaggacaataagggttaaaaaagcgtcttccagacaccaacgaataatgtttggaagacgctttttgttttggactgaatccagcttaattactggtatatcaacatttgtaagcaaaattaagttagacgtaatgactttaaaaaatccatgatagtaggtcataactcatgagttgtgaacctcttatatcgttacatattgttcttgggtaatgatggttagatgactaatattcacccctgcataggcattcttgggagtctagcctagggggaagtagtgataccgtcaaagttatgcctgatgaacatagtcaaaatatcgaaaaattatcatgtaacaaagttttaaaggcattagaactgggaggaaatttgatatgcaaaagagagtcgtccatctaattttagcaattattttcttaaccactacaatcgtacagtcatttggtagcgcattagtggtggctgtgaataaggagacggtgacagccaacacgacttctaagattgtgaacccacgaagcgcaattgaaggcgcgagctcagtttctgaaagcttagccagttcgttgcaatcacaatcgacaagcagtgcttcaacaagctcagatagtaagtcgagttcaaagagttctgattcagaatcgagttcaagtatttctgagaaaaaggaaagcgttaaatcgaacacgagtaaatcggtgattatttaaccacgatactggctttcagatttgactgatccgggcagtgaatatccagacttttcgattcctttatctggtcaaaacaacgttacaacgattgaagatgtagctaactattaatctcagtctgcaatttatttaacgtgtataatatttcggaggtacgcatattaaataatcgactgagaaaggtgtgcgaccactttagagaaatggtacaatataaaatgttggcgattacatttaaggagagtagcgtttatgattaaatttccagagcattttatgtggggagcagcaacatccgcacctcaatcagaaggatactccctaagttatggtaagtccccatcaacctgggacaaatggtttgagatgcaacctgataagtttaatagcgatcaagggcctgacacggctagtgatacttatcggttgtatcgtgaagacgttgaaaatatgcaaaagattggtttgaactcatttcggacatcgattgcttggacgcgattaatgcccgatggcaaacatgttaatcaagtagcggttgatttttatcgggattattttaagcgcttacgtgatgcagacattacaccgatcattaatctgttccatttcgatatgccttggtggctaatggaaaagggcggttgggagacacgcgaagcagttgatgcctttgcattctacgcaaaaactgcgtttgaattgtttggtgacttggttgatcgttggacgacttttaatgagcctatcgtgcatatcgaatgtggttacttaacgggctatcattatccagacattgttgacttcaagaaggctgttcaggttggctaccataccttgatggcgcatacagcagctgttgctgaatttagaaaagtgaagccggatggtcagatcggcattattttaaatatcacgccagcttacgctaagagtgatgcaccagaggatttaatggctaaacaaaatgctgacttactactcgctaagagttttctagacccaactgttttgggcgttattccagaagaattaattaacctcttaacaaaacatgagttattaccaatgacgaaaaaaggcgaccggcaattgattgccgatcattgtgtcgattttatcggcgtgaactactatcaaccaatgcgggttcaagcaccagagaatccgaagttcccagcacaaacaccggaagacttatatgctaattatatttggccagaacggaagattaatccatatcgtggatgggagatttatccagaagcattgtacgatgtggcaatgatgatgaaaaatgattatcacaacattccgtggtacgtttctgaaaacggaatgggtgttgccgatgaagaacgctttatgggtgaagatgggcaaattcaagatgactatcggattgaatttatgcaagaacatctgacgcaactacatcgtgcaattgaagccggcagcagttgttttggatatcatacttggaccttcaatgattgttggtcttggttaaatggttatcggaatcgttatggtttctactgtgttgatttggaccatgaggcaaagcgcacgatgaagaagagcggtcgatggtaccgtgaattgagcgagaataacggcttttaggccaaaaaaaaagaaccgacgcatcagtcggttcttttttgagttaaaagatatctgtttgaacatatttattgtgtaattcaaagaaatcataagtcgctaagttttcaatatccgcttcaccattgaagatggccgttgcagaaccagccaacatcaggttaattggtaaattatcacggaaacgagcgagaatcactggtttattgtgggcaaaagcataaccacattcccacatggtaccggaatcaggttcgaattcgccttcttcagatttaaaatccataacagcgactacgacgtctgcttggtcaatttgacgcgtatcgacattaaaagtagcgacttgccattcgaaagtaccgaattctgcatcaggataagggtgttggcctggtttgaaaagtgaatcagcatcaatcgttgggtttttaatgagtaaatcagccacttgatctaaccgatcgttttgttcggggctaaaaaatgggccagcgagataaacttgtttttttgagggcatgagagccgcctttctcgataatgttcgcgttttttgtagtaatttaagcttaaaaagctatttatttaattatatacgtacgaaaaataatattcaatatatgttctgcaaaaaaatacgtaaaaaaaaactgcgtaagcagttttagtgaacgaacaagtaaataaccaatagaataaaggccacaactaagattgtgaacatgtaagttgaagcggtactaacagctttcttacgttcctttgatagtggtcggttcgctagtttcttgtattgcttcttagcaatttcaaattgacgtttatctttcatttgtatccctcgcttgtttcagtgtccctattatagcatggaatacagtggattgataattattgatgataagactggactttcaatctggaacaagctacgataatgctatattggagtataaggaagtaacaaatcatgaaattaaagacaactaaacaaacaactggacataaattatcagttgcagggattttgattacgatgggcgtcgtttacggtgatattggaacgtcgccattatatgttatgaaatcaattgttgaggggaatggcggtttggtaaacatcagccgcgattttatcatcggcagtatttcgcttgtcttttggacgttaatgttgatgacgaccatcaagtacgtcatgattgcattgcgggcggataataatggtgaaggtgggatttttgcactgtacactttgattcgtaagcaagctaagtggctcgtgatccccgcgattattggtggggcgacgttattagcggatgggatgttaacacctgctgtgacagtcacgacggcgattgaagggttaaagggtttgccaattaatgggaacgttttaattaataatcaagatcaggtgattttattgacggtctcaatcttatcggtcttatttttcattcagaaatttgggactgatctaatcggtaaatcttttggtcccattatgttaacttggtttacctttattggtggcattggtttggttaacttaatgggggatctaacgatgctcaaggcactcaatccgtattatgcgattgaactactgtttagccctgagaataaggtggggattctaattttaggcagtgttttcttggcaactacgggggctgaagcactttattcggatatggggcacgttgggcggttgaatatctatggtagttggccatacattgcgctttgtttagtgttgaattactttggacaaggtgtttggttattacaacataaagatattgcggcatatcaacatatttctgatttcaatccattctttgaagtgatgccagcccaattaaaggtcccagcgattttactggctacaattgcggcgattattgcatcacaagccttaatttcagggtcatataccttagtatcagaagcaatcaagttgcgcctcttaccacgaattaaggtcgattatccggctaagttaaaagggcaactctatatttcaatcgttaactggattctatgggcggtttgtttaatggttgttttctattttaagaactcagcgcacatggaagctgcctacggtttggcgattacgattacaatgttaatgacaactatcttgctattccattacttgggacgccgcgagaagaaatgggtattggcttatttggtactcatcttcttcgggacaattgaagttattttcttcatctcaagtgccgctaaattcatgcatggtggttacgtgacagtcttaattgcggcgtttattctatcgatcatgtttgtttggtatcgtagtaatacgattaaggaaagtaatactttcaaggcaagtacggtttcattactagcttataaacaacaactacatgatttgcgagacgatacagcgttagctatgtatacgactaatttggtttatctttcaaaaccacagaataaaccatatgaaaagaatatggttaagaagaatattctttattctattttggataaacgaccaaaacgggcgcaagtttactggtttgttgcggtcaatgttactgatgaaccgtacacggcagaatataccgcagatacgcttgggacggactacattgtcaacgttcagttgtatctaggctttaagatggaacaaaaagtgaacatctttattcgtcaaatcattcaagaaatgattcatcggggagaattaccagcacaaccacaacgctacacaacaattccaaatcggaacgttggcgatttctcgtttgtgatcatgcaagaagatttatcaccagcaactcaaattcgagcaatggataaagggattgttcaaatgcgtttatggttagaaaaattcactgatacaccggcttcatggtttggattggactatagtgatgtgtttgtggaacgtattccgctagttcttggccgccaaaaatcggtctctaagtatcatttaaaacgtcgtgaataacatcaataaattagtttataacgcctaggacagaagattgtcctaggcgttatttgtgtaatagcagtcaagtaagcggtgtgcattacaattagcgcgggaattgccgtcattttgttacctgtttgtcatcaattgttatggttttgacatgtacaagcgaatataagatggtatattagtcccacgttaataaatcaaaacaacaaggagcacatctattacatgaaatcttttaagacattattgcttagcgctacattgacaacggctgcaacagcaggattacttttcgttggtcaatcaaaagcaagtgccgctactacttataccgttgcaactggggatacgttatcaacaatcgcccaaaaatttgccggtaacacagatttagtcaatcaaattgccacaacaaacaacattcaagatatcaacatgatttttgtcggggaacaattaacaatcgacactgaccaaacagcaacccctgttcaaacgacaacgccagtagttgttgcacaaccagccgctgttcaaacaccagcaccagttgttcaagcacaacctacagtgcaagctgcaccagttcaacaaacagctgctgttgcaccgacaactagttcagcgaaagaatggattgcgcaaaaagaatctggtggttcatactcagcgcgtaacggtcaaatgattggccgttatcaattaaccgcatcatatttaaatggtgactattcagcagtcaatcaagaccgcgtcgcagatcaatacgtaacaagtcgttacggttcatgggatgccgctaagagtttctggttaagtaacggttggtattaaaatttaaggttcctttaacgctcaatcaaatttaatttgattgagcgttttttgttctctgagaaatcacacttgactaaatcgaatgtatgttcgtataattaagaggacataagatgaattaaagaggtgtgcctgatgcatacgaataaagaagtgattacgctagatcaaacaggattgagtttatatttaaatggctttggagttttagaattgcggcgattagcggtgaatcatagtgatgatttgattgactcaatgaattattactacaaccgcgataagtttccgcaatttatttatcgtcatctatcagccgtcaccttgattgagattaatcggtggcaacgcgaattagatgaacaagtgcgtcagattcaagttggggtgaagagtcgtgtatgactatcagaatgaaccacgccgcgtgattttaatgattgattcgaaatctttttacgcatcagtagaggccgttcggttgaaactgaatccgttaaaggctattttggtggtgatgtccacggagaaaaacacgggcagtggtttagtattggcagccagtcccatggctaagaaattatttggtatcagtaacgtaacacgtgcccgggatgttccaattcatgataaacggttaatcattgagccacccaagatgaatttgtatatccaagtgaaccagaagattaaccgtatttttcagcaatttacggcagaagaagatattcaaccgtattccattgatgaatcgttacttgatgtcacggatagttggcaactctttggagcgacgccgtacgaagtcgcacgtaaaattcagctggctgtaaaaaaagaaacgggcatttatttaacggtggggattggcgataatccgctacttgccaagctcgcattggatcttgaggccaaacggaatcacagtttgattgcagaatggcattatgaagatgtcccagataaactgtggccagtgacccagttagatgatgtctggtcaattgggcatcgtacggcagagaaactgaatcagaaacacattcattcgatgtacgatattgcgcatacaaatccctatcggttaaaacaagaaatgggtgtcatgggcgcgcagttgtttgcgtttagttgggggattgatcgggccgttgtacggcataaatataaggccaaagagaagtcttatgggaatagtcaggtattaccacgcgattattttatccaagctgagattgaagttgtgattcgggaaattgcagagcaagtggctgcacgtctcagggcgcatcacaaggcgaccacggttatcagtctggggattggcttttcatttgctgcaaaagaggatgcatcgcgtggtggttttgggcgttcaatgaagattgatgcgactaatgctaatcagcaactcacaaaacatgccatccaactttttcgtgaagaatggcaacacgaatcgattcggcatattagtattgcgtgcagcaatttggttgacgatagtgcggaacaattagatatgttcgacacacagtttattaatttgaaaaagcagaaattagatagcacggtcgatgaaattcgcaagcgctacggttttacatcggtggtcaaattgtctagcaaagtaaaaggtgcgactgcaattgagcgtgctggcttagtcggtgggcatgctggagggaacgcctatgaataatgatgaatatgatcccaatttggttaatcaatttttgaagtatgattattatgatcgtggcatgatgaaatggcaaggtttctatttaagcgatcatacggcagtgttagataagaataaccgcgtacaagatcgtaagcgcaatgaaaaacacattgaggcgatgactgctgagatgattgctaataccatcaatgacgcaattgttaaatgttatccggttcaaatcgacaaagcagaacgttcaatagaaggtattgtacccagtaaggtggaaggtttaatcagtggctggtttggtagccaaataattgtggcaaatgaagccattttaatagaagaaatctacgcaataaaaaaactagccccctaactaaagcgtcaggaggctagcttttttacacgttttaaacaaacaaaaaagccgctaaaccttagtttaacggcttttctgggttctaggctgttttaaatatcacccgtacggggatcgaacccgtaactccgccttgagagggcgacgtcttaaccgatttgaccaacgggcaatgttcggaacaactaatatcttagcgaataaagcctgtaatgtcaatggttaattgactctagcgaggctaaatgaagattttatagttacgacgattaatgttaataatttccttggtcatagtgcgatttgtttgtctctttaaatgtttcaagatattccgaatatagtcctgatggtttatcagtagatttagaatatcgttatcaattgtgacttcaagcgtcctgcgtgaatctatccaatcaatcacaacgtggtcttgatcatatacggcaactttcccgtcaaataatttttcgatttctgcttttttcatcattggaaccacctccaagaatagtatagtcctcttttaaagatttgttaaaaatcataattgacaacgtctggagtgtgcagtatcatagtattcgttgatgatattgggtattcgccaaattggtaaggcaccggactctgaatccggaatttataggttcgagccctatatacccaattaagatagaaagagctgagtaatcagctctttttttgtggctttatatcgatagggcaaattatttgtagttctctgtctcaaacatgatttggatcgcatagcgatccgcaatcttagctaaagcccgtaaattgaagaaccaatagtgtgctaatagcttacttttgaaaattaatgttgtgtcctgagcaccggaaatttgaatcattcgatcatccaatgcgacgtttaaatctaaatcatttaattttaaaactttcattttgatcacctcgtcttattattacgttaaatagggcggttatttttgaaagagggttaattaattcaaaatagcatatttagcatttttatggactgtaatccttggtgttataaccttttaggccgattacaagtcaattaaattgtgggcttcattacaaagttaggtgaaattgccgtcattttgttacggatttgtcatcaattgttatggttttgatatttactaacggatttaagatggtatattagtcccacgttaaacagatagaaaaatcaatttaaacaataaggagtccattcaaaatatgaaatctttaaaaactttactttacagtgccgctttaacaaccgtcgcaacaaccgggttacttttcgttaaccaatcacaagccagtgccgcaacaacttataccgttgcaaatggtgatacgctttcaaccattgcgcaaaaattcaatggtagtacagagcttgttaaccaaatcgcaacaactaataatattgctgatattaatatgatctttgttggtgaacaattaacaattgatgctgatcaagtggcaacaacaccagcccctgttgtaactcaacaagtagctacacctgttcaaacaccggcccctgtagttcaagcacaacctgcagttcaagctgcaccagtacaacaagcacccgtagctgcacaaacaacaactacaactacaacgagttcatctaaggaatggattgcacaaaaagaatcaggcggttcatattcagcacgtaacggtcaattaatcggccgttatcaattatcagcttcatacttaaatggtgattattcagcagctaaccaagaccgcgttgcagatcaatatgtaacaagtcgttatggttcatgggataccgctaagagcttctggttaagtaatggttggtactaaactaaaataatgacaacgtctaggccattggtctgggcgtttttttatggtaagttagtgattggaagtgtaaactgaaagtagtataaagagtgaggcttgatcagatgaagattttaggagtgttaggcagtcatcaacgagatggggtcaatgggcaacttttagatgccgttttagcaggtgtaaaaccggaagatgacgttgaagtgatctttttaaatgattatcaaatattaccagatgctggcaaagccaatccggtattggatgaactggaagctaagttattggcagccgatgtttggatactggctgcgccaacttattgggggtgcaatgtcgggtgtgatgaaaaacttcttggattgcgtgcggcaacggttagtccgatttaatcgggcgggagatgcgttaccagatcgcttcaaaggcaaaagttacattacgattagtagttgttatgccagtccagctgaggaattggttactggtgtgactgacgggacttttagaacttttgataaagtcttgggggcagctggacttttaaaaatccgggaagttgtccagacaaaaacgtatggtttaaagacactttcagcgcagaaacaagcggaatgtcgccaagtcggcgcaagcattcaatctaaagcaaagaggacggatgatacagtgaaacggtatatacaactatttggcatggtcgcctgtgcaaccttgattacgatggtactgcaacaattagtgaacttagtgttgccaattggccagttttggcttaattatgtgtcattcgttttaatcttcttcattctattggcaagtgtgttacacttttttacggtggttaaacaccgcagacattaggagggattcagatgaaaattgcattaattgcacatgatcgtcagaaaccaacgattgtgaaactggcgacggcttataaacctattttggcgcaacacgaattatttgcgactggaacgactggtcaaaaaattattgaagcaactggcttgccgattacacggtttaagtcaggtcctctagggggcgatcagcaaattggcgcgttgatttcagaaaataagatggacctggtaatctttttgagagatccattgactgctcaacctcacgaaccggatgtgaatgcattaattcgattatctgacgtttatgaagtaccgttggcaaccaacgtcgggacggctgaagtattgctgcgcggtttggacttaggactggtcgactttagaaaagtggtccatggtcaagatgtcaattcaattaatttatagtgtaaagcggattgtaccttatttcgactgtgaaatagtgcaatccgttttttgatttcaattttaatttgcgtataataagagtattgatttggagggattgggttgcaaaaagaaatagggtttcatgatcggctaagcacggcgatgtttttaacgtttcttggtggcttcttagatgcgtattgtgtgattttacgtggtggcgtctttgcgagtgcacagaccggtaatatcgtgttcatcggcttagatatcgcaacgaaccagtgggcacaacttcctgaaaagatattacccattatttcatttgggtttggggttattattgtgcagctggcgaagcggcattttaacactggtgggttgaatgtttggcggttgtggttattaggttttcaaattattgctttagtagtagttggttttttatcaaccgcgattcccaacatgtttgtgacaccgattctgtcgatgtcgatggccatgcaattagcgagttattcaacggttaatggctatccatatgcgaatgcttttacgaccggcaattataagaaattaatcgaaaatacttatctatatttagcgaccaaagaaaaaaactaccaacaaaaagcccggtacttcgggttaattgttggtagcttcttcattggtactattagctcagggttaattgttaagttaatcaatgtgcgcactgcatggatagctgcgattatgttgacggtgttctttggttttcaattgtattttacagaagaagtgattgctgagaccaaacatatgcaacgttagccgtaataataaacaattaacatggcaatgaaatatgcgccgcaaacagcagtgctaatccaactggcaatcataatgatgggatgcgcaataaaggcacgcatgacaaagagaaacaaggttaaaatagcatacttaatacagctgacctttagctgttcaaaatgaggcttattcaaaagaaagatccactaaataaagttgacggtcactaagatgggcggtagtaatccacacatcttggaagccgtctttttgtttttcttcggtttgttgataaaaagtcgtcaataagtcatggtgttctttgacgtactcggggtcaatccggttaacgtgtagccgcatatcagggaacagtttctcggcatctggcagatcgacttggtcactaatgccaaagcgaatcacgttcgcatattgaaacggttctagaaccacttcatcaggatgttcttggatgtaagttaagatggttgttaatgcagacatagtcatgcttcctttctagtcgtttaaaaaatcgtaaagccagcagtaatgttattcaacatgtgtaaggcaatattactcttaatattatgggtgcgatagtagacgatagccagaattaggccaagcagtgcttttgaaatgaaataaatcggatcagttgcgccgtgcatcaatccgaataagatagcacttaacccgattgagatgattggtgtgcctgggaaaaaccaattcattaggaaccctctgaaaagtaattcctccataatcggacctaagaatagggcgtatggtagcatgaaaataccaatcgtctgaaagactgaggttagtgcatcaacattggcattaccggtagtatgcataaacgggattgtaccgttattgacagcaaccatcgcgataaagccaatcaacattgtccaccaagtctgtttggtgaagggttggtcataacgcgttgatttaattttttggtagtaataccacattagggcagtaatgccgatagtcgtgattagaaaaagccaaccaaagactaaaattagatgggttgtctgttgggccttagggagcaatgataagccactgacaatcattaaaggaacttgttggatgataatcagaagcaaaaagacaatcccatgtttgacgtgtttgataagcaccacctccgtgtgcttatcatagcatattcccgtgaatgaataaaagattgaatgcggattgctgttcaaggcacgatgctttatgttagattaaaacagttaagaaaggggtgtttggatgtatttagcaattaaagaaattaaacatgctaaattacgttattcgttgatcatttttacgatttttctaattgcatatttaatctattttttaacggggttggcatatgggctagccaataataaccgttcggcaattgatcaatggcacgccaaagaagttgttattagtcagtatgcgaataaaaacttggctgcttctgaattagatgttgatcaattaccctctattaaaggtgcacagaaaaatcatgcgcaacttgctcagatgatgggtgttgtgagtagttcaggtttaagtaagcaaaatacgagtgtttttggtatcgattttgatgcttttttgaagcctaagttgcaaaaaggacggtatcctaaaaaggcaaatgagattgtggtcgacgacggcttacaaggaattgctttaaatcaacaaattaaattgaatgggcgtcaacaaaagtacaaaattgttgggattacgacgaaccaccgctataatacgcaaccggtgacttatttgcggttgaccgattttagccgaatgcgctacggcactgatcagattacgcgcattaatgctttagtattaaagggaaacgcgcggattaagacaacggatcagctgaccaaactgacaattccagaattaatcgataagattccggggtatgggccacaggttaagacgtttggtttgatgattggcgcattgctagtcatcgtcgcctttatcgttgggattttcatgtatattattactattgaaaaaacggccgtatacggggttatgcgagcacaagggatttcaggtggccaattagttggtagtttaatgtggcaatctgtattcttaggggtgattgggattggccttggtttgttgtgtaacgcattgacaacattggtattaccagcggcggtgccgtatacaaataatcctttactaattggggccttttctgctgttttacttgtgatgacagtcattggcgctttattctcaatttggcggattctaaagattgatccgcttgatgcgattggaggggcataggatggctttaatgcgtttagaaaaaatcgtcaaaaaatttggcgcaggcgaccagcaaaccacggctttagatcaaatcgatttaacgattgaaaagggccagttcattggtttaaccggaccatctggttctgggaagacgaccttattaacgattatgggtagtttacaaggcccaacgagtgggaagctcttttttaaagatcaagagattagtcaattaagcgaaaaacagcggtctgcattacggtttaacgatttcggctttatattacaaagttcgaatctggttccatttttaacggttgaagaacaattcgaactagtcgatcgattacgtgaaaagcaagcgccacaatcagctgaacaactattaaccaatttaggtgtttgggatcaacgacgtcagtacccaacgagcttatctggtggtcagcgtcaacgagttgcgattgctcgggcattgtatggtcagccagatttgatttttgcggatgaaccaaccgctagtttagatagtaaacgggccttacaggttgctgagcagctggctaaaatcacgaaagagacaggacagacgattgtgatggtttcccatgatgaacgcgtcttggattatacagatcatcaatacgtgatgcgcgatggtaaactgacataatgcgactcataatcataaattttgactaatgttggttagctatcctatcatataggtagaccaataagaaggagtgattttgaatgacagataaagaaaagttagatggcatgaaagaccaagtaaccggtaaagtacaagaaacagccggtaaggtgactggtgatcgcgaaactgaggccaaaggtaaagcaaagggctttatgggtgaagctaaagaaaaattagcggatgccaaagacaaagttgctgaaaaagccaacgacgtgatggatgatattaaagaaaaaatggacaaagacgataaatagcgccttttaaagggaaccggcagacgatagtctgccggttctttttttgtggatttaatgcttgcatgagtgcctaagttggcgtattatgacattacgtcacaattatgacgctctgtcattaattttcagaaaggagtatcgaaatgccgaagaaaacattttttagattacctgaggaaaagcaacaacgactgattcaagctgcgcatgctgagttttcacgggtaccgtttaatgaagcatctgtcagcaacattattaaaacggcggagattccgcgaggcagtttttatcagtactttgaagataaggcggatatttttttctacgaccttagcttattacgcgacagttcaaagcaggatttagaaaagagtctgttggctgttcatggtgatctattcaaggcaattcgccaattctttgctgaaatggcagaagagattattaatggtgaaaatgcaccattttacaagcacctcttcttacatatggattataagaaccagcgcaagatgtcaccagaattaatgcatgccaaacaagtagatgggatgcgctttttagaagaaaacgtcaattacgacttgctcaagattaacgcagatcaacccgaagcgcttagaattttatttcatgagttgatgacgacggtctttcaaagtattgcagcgtattatctgcaacaagaaagtgaccatgcgattacaattgaacaggtccaagaacgcttcgaattagtattaggctggttagaaacaggggccagcaaacaaggataaggaaagaagggacacacaacatgcttaaacttgcaaagaaaagaatgtcaggttgggccgtctttggtgcggttttattcatgacgattcaggttgtcagtaacctttatttacccaatttaacctccgacattgtcaatgacgggattgctaaggggaatattgattatatctggcaagcaggctttaaaatgttaggtttttcattaattagtattattgcagccgtctgcaacgtttatcttgcggcacggacgtcacaaggcttaggccaaaaattacgttcagatatctaccggaaggtcatcaacttctcacacgatgaaatggatcaagttgggacgtcttcactaattacgcggacgactaacgatgtggtgcagattcaaaatgtggcaatgatgttcttacggatgatgattatggcacctatcatgttgattggcgcaagtttcttagcgtatcaaaaagatgcgcaacttacatccattttcttggttgtcttaccaatcatggcactcttcattggtggggtgatgtacttcgctgtgccattattcaaggcaatgcagaaaaagacagaccggattaacttagttttccgggaaggtttaaccggggttcgggtcattcgagcattccggcgcgacaagttcgaacaagaacgttttgatgaagctaatactgactacacgcaaaatgcgaagaaagtttatagtattatgtcagtgatgttcccagccatgacgttaatcatgagtgggactaacattgcgattacttggatgggtggacacttaatcgccaatcaagcaatgcaagtcgggaatttattagcgttcatgacttatgcgatgcaaatcctcatgagtttcatgatgctttcaatggtcttcgtctttatcccgcgggcgcaagcttcagcagtgcggattaatgaagtgcttgatttacacacgccgattgaagatccagcgacgcctaaaacgtttggtgatcaaccagcaagcttggctttcaaccaggtcaacttccgttatcaaaatgcggaacacttagcgcttgaaaacgttgatttccaaatgacagcgcgccaaacagtcgccgtgattgggggcactggctcagggaagaccacgttagtcaacttgattcctcgtttttacgatgttgaaacgggtgaagtgacagtcaaagggttaaacgtgaaagatgtgaccctccatgacattcaccaacaagttgcatttgtccctcaaaaagcgaacttatttaccgggacgattcgggaaaatatgcaatatgggaatccgaatgcgaccgatgatgaaatctggcacgcacttgaaattgcacaatctaaagatttcgtcagcgaacttgaaggtggcttagatagtcacgttgaacaaggtgggggcaacttctctggtggtcaacgtcaacggcttgccatcgcacgggcgttggttaaaaaagcggctgtttatgtctttgatgattctttctcagcgttggactttaagacggatgccttattacggaaagccttaaaagaagatgctgaaattcaaaagagtgtcgttgtgattgttggtcaacgggtatcaaccgttgccgatgccgacaccatcttggtcttggatgaaggccagctggtcggtaaaggctcacatgctgaattgaaggctaataacgccacatatcaagaaattattaactcacaaatcagagagggggatgaagactaatggctgaaaaaacaacaaccaatcgaccccaaggtggacatggcccaggccgtggcatgggtggtgtcgttgaaaaaccgaagaatttttggggtacaaccaaacgattattaacctacatgtctagccggttaatcggattagtgattgtgttagccttagcaatcatctccgttattttccaaattagaacaccaaaagtattaggacaagcaacgaccgaaatcttcaagggtgttatgaagggcaatgccatgcaaaaagcgggcatgccgatgaatggcttaccaattgatttcgataagattcaacacattattatgacggtgattttgatgtacttagcatcagcggttttcagtttcttacaacaattcatcatgacgcggatttcccaacaaaccgtctatgaattacggaaagaattaaaagacaagatgcaacgggtaccgattaattactacgacacacactcaaacggcgatatcatgagtcgtgcgattaatgatatggataacattgcaagtaccttgcaacaaagtttaacgcaaatggtaaccagtgctgtgacatttattggcgttatgtggatgatgctctcgattagttggcaattgactttaattgccttagtcacgattccactcagtttagtcgtcgtcgggattgtcgcaccgaaatcacagaaattcttcgcagcgcaacaaaaaagtttggggttgttgaacaaccaaattgaagaaaatttctctggtcaagtggtcttaaagaccttcaaccgcgaacaagtcacaattgatgcctttgaagaacaaaatgcattactctataaagcagcttggaaggcacaatttatttctggggtcatcatgccgttaatgacgttcgtcaataacattggttacgtcttcgtagcaattgtcggggggattcgtgtttctcacggccaagttactttaggggatatgcaagcgttcatgcaatatacgcaacaattctcacaaccaatcacgcaattggccaacttagcgaatacaatccaatcaacgattgcctcagctgaacgggtcttcgaagtcttagatgaagataacatgagtgacgacccatcagaagtgtcggcgattgttgatgaccaaaatctacttgaattagaacatgtcgaattcggttatcaaggtaaagatatcttgatgaaggattacaacttgcaagtcaaaccaggccaaatgattgcgattgtcggcccaacaggtgctggtaaaacaaccatcattaacttgttggaacgcttctacgacgtgagtggcggttcaatcaagcttaaaggtgtcgatacgcgcgatatgactcgggaacaattacggcgtcacttcgcgatggttttacaagatacttggttatttactggaacgatttgggataatttgaaatatgggaacgctgatgcttcagatgaagccattttagcagccgccaaagcagcgcacgttgacggttttgtccgtcaattacctgatggctatgagacggtcttgaatgaagaagcttcgaatatctcccaaggtcaacgccaattattgacgattgcgcgggcctttgttgccgatccagagattttgatcttggatgaagcaaccagttcagtggatacacggactgaaattcatattcaacacgccatggaacgcttgttgcaaaatcggaccagtttcgtggttgcccatcgtttatcgacgattcgcgatgccgataacatcatcgtgatgaatcacggttcgattattgaaaccgggacccatgatagtttgatggcacaagatggtttctacgctgacttgtacaatagtcaattctcaggcaacgttaaaatttaatcatgaatgacgcaaataaggccgcagataaaatctgcggccttatttttgtccgtgtttggtgtatactagtgatactgatgtagtaggaggaatttaacatgcgatttgaacaaaccatccggcaaattggagcgctagttgatgaagggattgtccctggtgtttcttatgccatcatcgaaggccctgaagtgatgactaatgtaatcgggcaggccgaattagtgccccaaaaagtgccgttaaaagctgatcagttgtatgatttagcgtcattaacgaaagtgattggcacgacgacgattgttttgcggctattggaaaaagggcggctttctttacgaacaaaagtgcatagtttgttgccggcctttaaagatcgacgggtgacggtcttgcatctattgacgcacacgtccggtttaacgggctacattccgaatcggaatcaattatcggctgccgaattagaaacggcgcttttgacgcaattaacggtcggcccaaattttggtgaaaaggttgtttacacggacattgatatgttgtatttgggctggatgattgaagccatctatcaaaaaccgattcaggatttgattcaagaactcgttttaaccccactcggtatgcaagccagtacgtttaatccggacagaagtttggcggtcccgactgaattgagtgccgaacgcggcttaatccagggcactgtccacgatccgaaaagtgcgattttacaaaatcatagtggtgcagccggcttgtttgctccattaaaagacgttgtccgctttgcccagttccaattagggcagttgaaggttgaccagccaccaatcagtcaggcgagtgttaagagtctctatcgtgattggacaccaaaacatctcgggcgctcactgggctgggatttgcgctttgagccgcaagaacaccagccactgatttatcacaccggttttaccggcacgttcatgctattggatcgcaagcggcaaacggggctgattgtcctgagtaatcgcattcatccaacggctgataatccggtctttttggaacaacgggatgcgattgtggcacaatttttagcggataatcacctagaaacaaaagcctagtcaaattcgcaaatttgcgtattatccgcttacatttgtggtaaaatgggactattgataaataaagcgcattaggagtgagtgaattgacagaacctttatttctaaaacctgtttttcaaaaaaaaatttggggtggtcgcaaattagctgaagccttcgattatgatttaccagacggcgatattggtgaatgttgggccatttcagcccatccccatggtcctagtaccatcgaaaatggcccattaaaagggctcacattagatcaagcatgggcaacccaccgcgaatatttcggtaatgcagaaggtaaagtattcccattgttaactaagattttggatgctgaagcaagtctttctgtccaagtgcacccagatgacgcttatgctgctgctcatgaaggtccaaccgaactcggtaagacggaatgttggtatattttggatgctgaaccaggtgcttatttaatctatggccaccatgccaagaccaaagcggaattaacagcaatgattgaagcaggcaagtgggatgatttactccgcaaagtgcccgttaagactggtgactttttctacgtcccaagtggcacgattcacgcattgaacaaagggattatggcgcttgaaacccaacaaagtagtgatataacatatcggttatacgattatgatcgggttgatgctaagacgggcgaaaaacgcgaactacacttgaagcaatcaattgatacgacgattgtgccgcatcaagatcccgttttgaatattcaaacagaacatgttggagattcaacaatcacgacttatgtgcaaccaccaatgtcaccatttttcagtgtttaccaatggttagtgaagggcgacttacactttgatcggacaacggcaccctatactttagtctccgtggtcgatggtgaaggcgaactgattgccgatgggcaaacttacccaattcacaagaatatgcattttgtgttaccatttgatattaagtcatgggacttaaaaggtgacatgcaaattattgcgtcagaaccgggtaacaagtaaactgaatataaccaattgcaaccgcagccgtagttgcaattttttttaatgattaaaagagtaggatgacaagtatgcaaagacaaatcgaagcaattgaacaatttgtacgaacggaattggcagcagaacacagcggtcatggattcgatcacattcaacgggtcgtgaataatgcctgtttaattcagcaaaaagagttagctacggacctaacaacgattatcttggcggccttattgcatgatgtgattgatgaaaaaatcgcgactgatgttgaacaggctcgacaaaaggtaaaaactaaactaaccgaaaacggcatacaagatggccaacaaacggcaatttttgatattatcgaccacatgtccttttcgaaaaatctcaatcaacaccaaacgctaagtttagaagggcaaatcgttcaagatgcggatcggttagatgcaatcggcgcgattgggattgggcggaccttcatgtatggtggcgcacacgatggggttgcttatgatcctgagattcaaccacgggcggaattgacaaaggaaaactatcgcgaaccgtctaccgtgattaaccatttttatgagaaattatttaaattggcagcaacgatgaacacacaggcagcgcgcgaaatcgcgcaagcgcgaacggatttcatgcaccagtttgtggatcagtatttagcggagtggacagggcaacgctaaaaaacgaaacattgatatgcaaaagggcggtaacaatatttttgttagcgcccttttggatagttgtgttctgatcgtttaaacgtgttctgtaagtcatccgaacccagagccacacgttagccatcgaccgttagccagtcgttttggagtagttcgtgggttctcttttgcaggggtaaccacaattcagcgcggaggatattgatgagggattcccagaagaggcggtcctttttttgttggtcggtaatatgtaattcgatttcttgaccactttcagtggttgcgaaaactttatcatgattttcaatccgattaatttgaacggactcgactgctggcatttgatttaacataatgattcgctcctttttataggttaaagtcagtataccgagcaagtattgtgaaacgattatcattttatgaataaaaagtgtattttttcttgcgaaatgattaagacatcaaaaaagtcgaccgcataatggtcgactttttgatttgttaattttggacgcgtttgacgccggctgcatcgacttggtaacgtgattcttcgagtggtaagtcagcgatttgttgtaaatcaaattctggaaaacgccggctaaccgcaatcgataaaagtcgtttggctaaaacaccgttgtgcgtgagaattggaccatggaagtatgaaccaaatgtgtttttataaacacaaccttcggtgccgtcatcaccattgttgccgtgaccacgtttgatgtaaccaagtggtttttcatccttgcccaagaaagtccggccgttgtgattttcaaaaccgaggtaggtttcgttaaactcacggttttcgatgacaatatcaccgataaaacgattgttatcttggctcaatgtgtaatgatcaagtgcgccgattccaggaatcttgtcgccgtttgcgccaatatagtagtgacctaataattgataaccaccacagatggcaagcataacaccaccgttttcaatgtattcggtgagggctgcttttttgtcgttgaggtcttctgagatgattttttgttcgaagtcttggccaccgccgaagagaacgatatcgtaacgacttgcatcgaaatcttgaccgatactaatgacttctgtttcagtttgaatgccaacttttttggcatagtaatcaaggactaaaatattaccaagatcaccatatgtgttcattaaattgccgtatagatgacaaattcttaatgtctgggtcatactgatagtcctttcttaatataattggcagctgccagcttcttacgtagttgtaaaacagcggtataagttgctaatacataaacatgtttggttggggctgcttcaatggctgccatcgttgcatcgagttctttagtttcgtgtaattgatctgccgtgacaccggctacttttagccggaaagcgatatcgtcaccgcgttcgccaccggtaatcacggttggaatgttgtgtttgagtaagtcttcaaactcgccatcccaaatccaactcgtatcaattccatcggcatagttagcattaagcaacattgcgagtgaaaagtcttctggatcagaactgatcatttgtaagacttggtttaagccaaccggatttttaacgagtaccaatgtgaccgctttgtcttttaattgaatgacttcttgacggccaaagattcgtttgtcttcagtgaaggccttttgaattgctttcactggaatatcaaagaatcgaccgacactataggctgcaagtgcattatagatgttgtacatgccgccaattgaaatttcaaacggttcgttgttaatttcaaagtgtgaatttgtggggtgcatctgattgatggcagtgactgcttcgtctaattcaggtcgttggtagccacaattagggcagtaaaacttcccttggctggcataactgatgaatttgtaatgaatgatgtgatcacaaacggggcacaaaacgccgtctgtgttgcttggagccatcatttcgccatctggtaagtggttgaatccgtaataaatctttggattaggaagttcaaccgatgaaaagagaggcaagtcagcgttcataatgagggttgcctcaggaacgagtttgacgcccgctagaatcatattataagtcgtgtagatttcgccgaaacgatccatctgatcacggaaaatattcgtcatcacaatcgctttgggcttgatgtagtgacaaaggggttccacattggcttcatcgacttcgaggacggccaattgccgttgtcctttttgaggatgatctgctaaaaaggcggtggtcaacccttgcatcatgttcgagccactcgaattggtcatgatatgatcgtatttttgcttcaacgtctgcacagtgagtgcggtcgttaatgttttaccattggtaccggtaatgataatcacgtcgtagttcttggttaactgctttaacacagcaggatcgaacttggttgcgattttcccggggagggagctgccacctttcataaaggtatgtaaataccaatatgaaaaacgtcctgctgtaattgcaaatgagcttttaattgtcatgcttgccaccctttcaatgttcataatcatagcataaattctcaatttggacgatataaaaacgcatctgcaaataaaataagggaaactttagaatttaatagtggcgaatattgttgcctcgctgattttcaggtatactagattaaaatgtgcttaacataggggtgtttgagagtggcgcaattattttttagatatggtgcaatgaatagtggtaagtcgattgaaattttaaaagtcgcacacaattatgaagagcagaataaatcagtgatcatcctgacgagtgggattgataatcgcgacggggtggggattgtttcaagtcggattgggctcaaacgtgaggcgacaccgattttctcggatacgaatatctttgagttggtacaatcgactaatccggatgcagcgtgtgtcttgattgatgaatcacaatttttagaacggcatcacgtaatcgaagcggcgcaggtcgttgatgatttgaatatcccagtgatggcgtttgggttgaagaatgattttaagaatgaattattcgaaggctcgaaatacttattgctatttgccaataagattgaagaaatgaagaccatctgttggttctgtcgcaaaaaagcgattatgaacttgcgaatgaacgatggcaaaccggtttatacgggtgaacagattcaaatcgggggcaacgaagcatactaccccgtttgtcggaaacactattttaacccaccggtaacacaagagagtgaaaaggaaggctagtcattcatggataaaatgtttgaacaacttgatagtttgttagaccgctatgcggaattacaggaattaatgtctgatccagaagtgatcaacgaaaccagtcggtatatggaattgtctaaagaagaagcgggtttacgggaaattgttggtaaatacacgcgtttgaagactgtcttaaacgacattgcagaaagcgaagaattgttacgcgaatctaatgacccagaaatggaagaattagctaaagcggatttaagtgagttacaagatgaaaaggaacaattagaacaagacatcaagattttgatgttaccaacggatcctaacgatgaaaagaatatcatcatggaaattcgtggggctgctggtggcgacgaagccagtctctttgcaggtgatttgttgaatatgtatcaacgctacgctgaatcacaaaactggcaaactgaaatcatcgatgaaacggctacagaagtgggtggcttcaaagaagttgcgatgatgattaccggtaaaaatgtttattcgaagttaaaatatgaaaatggtgcgcaccgtgtccaacggatcccaaagaccgaatcacaaggtcgtgttcatacctcaacagcgactgttgcagttatgcctgaatatgatggggttgacgtgcagctcgatcctaaggatattcggactgacgtttatcgtgcctcaggtgctggtggtcaacatatcaataaaacctcttcagccgtgcggatgacgcatattccaaccgggattgtggttgcgatgcaagatcaacggtcacaacaacaaaaccgagtgaaggcaatgcaaatcttacagtcacgggtttatgatttctatgaatcacaaaatcaaagtgaatacgattcaagccggaagtcagcggttgggtctggggatcgttctgaacggattagaacatataactatccacaaaaccgagtgacggatcatcgaattggtttaacgttaaacaaattagatcggattatgaacggggaattaggcgacgtcattgatgcgttaattctttacgatcaaaccgaaaaattggagcaattacaagatggcacagctcacttatcttaaagccctgaattgggcttttttatttttagaagaacacgctaaagaacgtgaagcagcgcgctttttactactcggtcgtaaacattggacgacgacccaactggtcttgcattatcacgatgaaatgccgactgccgaatacgatcagtatcaagcagacttaaacgcgtttatcgctgatcaaccggcacaatacattttgggatatgctaatttttacggacgcgattttaaggtgacgccggcaacgcttattccacgacttgagacggaagaattggtagaatggatattagatgctacacaaccaaagaaccgaccacttaaagtgttggatgttgggacaggaacgggcgccattgcaattacccttgcctgtgagcatccagaatgggaagtgaccgcaattgatatttcactagaagcgattgctgttgcacaagcaaatgcgcgccaattaaacgcgcatgttaactttatcgtgggtgattttctaaccccagtgatgggccaacagtttgatgtgattgtgtctaatccgccatatattgcacaagatgaacggcatgtgatggatgcgtccgttttgaaatacgaacccgacttggccctatttgcagataataacggcttagcgttttatgaacggtttgctaaagaagtgcgtgcgtatttaaaaccagatgggcagctttatttagagttcggttatcagcaaaaagaggcgatcgttcggttattcgaacatgaatcgaccgatgtagcggttacaatcaaaaaagatatggctaattggtctagaatggcccgtgtgggttacgatttcaatcggaatttggtatgatgtaaatcagaagtagagtaaggaaggcctataatggaaaccaagagatacacagtagaacagattgaacaagcagcagcagatttaaaagcgggcgaattgatttcatttccaactgagaccgtctatggtcttggggcagatgcgacgaatcctgaagcggttaagaaagtttatgccgctaaggggcgcccaagtgataatccgctaatcgtgcatgtagcaagtgttgcgacggttgagcattacgcagccggagttagtgatcgatttaagcaattagtcgacgctttttggcccggttcattgacaattattttgccgctaaaacatgcggcactagattcagttgtgacgggtggtttaaagaccgctgcctttagaatgccgaacaatgcggtgacgttagacttgattaaggcggccggtgtcccacttgtggggccttcagccaatacatcaggcaagcccagtccaaccactgccgatcacgttttacatgatctaaatggaaagattgccggtgtcattgatgatggtccaactggtgttgggttggaatcaacggtgattgatttaagtgttgcgacacccgttattttacgacccggtgttgtgactcaagaagccattgaacgtgtgattgggccgattatgacaaaccaccataaagttggcgcagctgaaacgccaaaggcaccaggcatgaaatacaaacactatgctccaaatgcacaggtttacatagtgccaacgccagatgaatttccggcggcggttaaatgggccagtcaacaaagtgtgccatttggtgttatggcggttgatacggtgttagggcagttatctgacgttaggtttaaagatcagttctctttaggtgattctgtagtgactgctagtcaacacttgtttgaaggattacggtattttgatttgaatcctgaggttaaaattatattagtgcaaggcttcgcaaaagagggtgtcggattagcgtatatgaatcgcctcgagaagtctgccggccaacaatactttacttcgaaataggcactattttaataggaagaggagtgattgtaaatgattgaacaaactgatccagaaatttacgaattgattaaaaaagaggaacaacgccaggtgcataatattgaactaattgcttctgaaaacattgtttccggagctgttcaagaagcacaaggtagcgtattaaccaataaatatgccgagggttatccgggcaaacggttttacggtggttgtgaatttatcgatcaaattgaatcactcgcgattgaacgtgctaaacaactttttaatgcagaacatgccaatgtacaaccgcactccggttcgcaggctaatatggcagtttaccaagcgcttttagaacccggtgataagattttagggatgaacctcacagatggcggtcatttaacccatgggtcaccgtttaacttcagtgggcaactttatcacttctatagttatggcgttgctgacgataacgaacgaatcgattatgatgcgctcgctgctaaagcggatgaaattcatcctaaaatgattgttgcaggggcatcagcatacagtcggacaattgacttcccaagattacgcgccattgccgatcatgtcggtgcctatttaatggtcgatatggcacacattgctggtttagtggcaactggtgttcatccaagtccagtgccatatgccgatgtggtgaccacaacaacgcataaaacgttgcgtggacctcgtggtggaatgattttgtgtaaagcagaatatgccaaagcaattgactctgccatcttccctggtattcaaggtggaccgctcgaacatgtcattgcggcgaaagctgttgcatttggtgaagatttacaacctgaatttacagcatatacaaaacaaattgtggccaatgcgcaagcgatggctggcgttttcgaacaatctgacttagtacgtgtggtttcaggcgggactgacaatcatttaatgttactcgatttaacgcagagtggcttaaatgggaaggaagtccaagcatttttagatagtgtccacattaccgttaataagaataccattccttttgaaaaattaagtccatttaaggcaagtgggattcgaattgggaccccagcaatcacatcgcgcgggtttaaagaagcggattgtgaattgattgcgcaattaattttagaagtgattgaaaaacacgatcaattagacgccatgacgcgcattagtgcagatgttttagcgttgacggatcattttccaatcacacaagctaaatttttagattaattaatgaataccgctagttttttgatgctatttacgctacaatagtaaacagaattttacgcggaagggagagtgactcggagaaggttttctttggagtcactctttttttgcgaaaaaaatttggactaaattcattgaatagaataggggcaaagtaaatggcaaaattcacagtattaaatcatccgttaattcaacacaaattaacgattatccggaataaggatacgggtactaaagttttccgcgaagtcgcaaacgaaatcgcagaattaatggtttatgaaatcacgcgcgatttagcaatggaagacgtagaagttgaaacaccaatggggcctgcaattgaaaaacaattgagcggtaaaaaattagccgttgtgccaattctgcgtgcaggtcttgggatggttgatggcgttttagaattaatcccagccgctaaagttggtcacattggtatgtaccgtgacgaaaaaacattacaaccccacgaatactttgttaaattaccaacagatatcgatcaacgacaactattcatcgttgatccaatgcttgcaactggtggctcagcaatcatggccatcgatgcccttaaaaaacgcggcgcaacgtcaatgcgccttgttgtactagtggctgcacctgaaggcgttaaagctgttcaagaagcccatccagatgttgacatctatgcagctggtcttgatgatcatttaaacgaggatggatacattgttcctggtttaggggatgcaggcgaccgtcttttcgggactaaatagccattaattaggtaccgataataaaagcgcgcaacacttgattttcctgtgttacgcgttttttttgccaaaaaagcaaccgttaataagtttaatcttttgatatgataatatttatggtatttgagtgcattgacaaaaaaataattagaaattagttagtatttgctttgtacttttaatttaatggtggtattatcatacttgtattgcggtgatgatttatgcttaatttttctacataaatattgctgtttttaggttcgttgtgcaactcgcgtagacgtagtcgttgatagagtggaatcaacaaataagcctaagggaggagggaattttgtggatgataaatatcccattattagcattttgggaattcgttttaatttagcaaactgtctatcggtcttagtaagtgcagttttggtttttgcactcgttttctttttatcaagaaaaattgcgcttaaaccgactaaacggcagaatattttggagtggatcattgattttacgaacggaatcgttaaaagtgcgatgcccggtgaagaaggtaaacaattttacttatttgcattcgtcatgttcatgttcgtatttatcagtaatcaacttggtttgattcttcaaattaaggtacatgatgtaacttggttgaagagtccaacggccaatccgattatcactatgtcgcttgcgatgatcgtcttagtgattgcgcactactttagtgttgaacggttagggtttggtaattacatgaagagttatattaaaccggtaggatttttcttaccaattaatatcatcgaacaatttaccaatttcttaacgttgtccttgcgtttgtacgggaacatttttgcgggtgaagttttactaagtttattagttaaaatggccttctcacatggaccagcaacgatgcttgtgacggcaccgatccaaatggtttggcaaggattctccgtctttatcggggcaatccaagcatatgtatttgtaacattatcgatagtctatatttcagaaaaagttgaaatggaagactaaaaattaggaggaaaaaacatgaactatttagcagcagctatcgcagctggtttagcagcattcgcagcatcatatggtaacggtaaggttatctcaaaaacaatcgaaagtatggcacgccaaccagaattatcagcagaattacgctcaacaatgtttatcggtgttgggttgattgaagctgttccaattctttctatcgtcgtttctttcttgatcttatttagttaatccgagtgaatctaaattttcgctttaaaaattagtcagtaagtcaaggaaggagtgtcaatagatgtttagtaatttaatcgttggtgcttctgaagcctaccttggagattcacttttcgtattagttgtctttattattttagtcgctttagttggtaaatttgcgttcggacctgtttcaaaaatgatgcaagctcgttctgacaaaattacaaacgacttagataacgccgctcaatcacgtgaagatgctgccaaattagcagcacaacgcgcaacagagttgaagaattctaagtcagaagcagttgaaattgtgaatacagccaagcgaaatggtgaaaaacaacgcgaaggcatggtcacacttgctcaagaagaagtccaaactttaaaacaaaatgctaaaaaagacatcgaacaatctcgtttagatgcgttaaacagtgcgagagatgatgttgctcaactatctattgaaattgcttctaaactcattaagaaagaattgtcagttactgatcaaaagtcattgatcaattcctatattgaagggttggacaagcaaaatgaaactagataaatatgcagtcggacaacgctatgcaaaggcattattttcccttgcagaacaagagcaacaatttgaaagtatccatgaagagatacaagcactcgagactattttcaatgacaacccaagattgggtgcagttctgactgatacgactttatctggattgaaacaacgtgagcttctaaagagcctttccggtgaatttagtacactcatgcaacactttttaagccttgtttttgactatcaaagaatggctgagatgccatacattattgcggcctacgaagatctttatgatcaaaagatggggattgcacacgctaaggtaacgtcagccgttgctttagatggtgatcaaatcgcaaagattagccaaagctacgctaaacgcgaaggtctcaatcaggtcttagtggaaagtatcgttgatccagatattattggtgggattgtactggaatcgaatcacaaggtgatcgatggcagtgttaaacatggcttagatcaaattaagtcattactattgaaatagtcaatcgttgataaagaggtgaacctgatgagcatcaaaactgaggaaatcagtgcattaattaaacaacaacttgcaaattataatgaagatttagccgttgaagaagtcggtactgtcacttatgttggtgatgggattgcacgtgctcacggtttagaaaacgccctttcaagtgaattgctagaattttctaacggttcatacggggttgcgcaaaacttggaaaccaacgatgttgggattatcatcttaggtgaatatgaaaacattcgtgaaggtgaccaagttaaacgaacaggccggattatggaagtgcctgttggcgatgctttaattggtcgtgttgttaatccattgggtcaacccgtggacggcaaaggcgaaattaaaacggacaaaactcgtccaatcgaaaagaaggcccctggcgttatggcacgtcaatctgtttcagaacctttacaaacaggtttgaaagccattgatgctttggtaccaatcggtcgtggtcaacgtgaattaattatcggggatcgtaagactggtaaaacatctgttgcgattgatacgattattaatcaaaaagatcaagacatgatttgtatctacgttgcgatcggtcaaaaagaatcgaccgttagagcgcaagtggaaaccttacgtcgttacggcgctatggattataccatcgttgtcgaagctggtcctagtcaaccagcaccattactctacattgcaccatatgctggtgcagcgatgggtgaagaattcatgtataacggcaagcacgtcttaatcgtctatgatgatttaagtaaacaagctgctgcttatcgtgaaatttcattacttttgagaagacctccaggccgtgaagcttaccctggtgatatcttctacttacattcacgtttattggaacgggctgctaagttaagtgatgaattaggtggcggttcaatgactgctttaccaatcatcgaaacacaagctggggacatctcagcttatatcccaactaacgttatttccatcactgatggtcagatcttcttggaaagtgatttattctattcaggaacacgtccagcgattgatgctgggtcatctgtttctcgtgttgggggcgcagcgcaaacgaaggcgatgaagaaggtttctgggacattacgtcttgatctttcatcataccgtgaacttgaagcctttacgcaattcggttcagacttggatgcggcaacacaagcgaaattaaatcgtggtaaacggactgttgaagttttgaaacaaccacttcacaaaccattaccattcgaacaacaaacaacgattctttatgcattaacacacggctttattgatgacgttccagttgacgatatcatgcaatatgaaagtcaattgagcgattatcttgaaagtaacgcaaaggacttgatggacactatccgtcaaaccgctgcattgccagatacagataagttagatgctgctatcaaatccttcacagaaggttttgtcggcgctgaagctactgctgacaatcaagactcaggacagtaaggggtgaattaattggctgaatctttaatggatatcaaacgaagaatcgcctctactaaaaaaactgggcaaattacgagtgctatgcaaatggtctctggtgcaaaactttctcagattgaaaaaaattcaatcgcttatcaacaatatacgaataagattcgagaaatcgtcacgcatttggctgcaagtcaattaattgcaagtgcacgtcaaaaaagtaccgctaaagcagcagaagctactaacggtacttcacagaaatcattgcggcatgacattacgttaagtaatttgttagtggaaagaccaatcaaaaagaccggttatttggtcatcacgagtgatcgtggattggttggcgcttataacagctcaatcttaaaagcaatggttgaaatgatttcagaaaaccacaagtctgccgatgaatatgctattttagccgttggtggcactggtgctgatttctttaaagcacgacaaatgaacttatcctacgaatatcgtggtgtaagtgatgtgccatcatttaatgaagtccgtgaaatcatcaaaacagctgttgcaatgtatgatagcggcgtgtttgacgagttgtacgtttgttacaaccaccatgtcaactcactgacatctgcttttcgagctgaaaaaatgctacctattaccgacttggatgtttcagaagtcactgataaagatcaagaatacatcacagaaccttctgttgatgatgccttagatgccattctaccgcaatacgctgaaagtttgatttacggcgcactacttgattctaaaacagctgaacattctgcttccatgacggcgatgaagagtgccactgataatgctaataatttaatttctgatttatcaattaaatttaaccgggcacgtcaagcacagattactacagaaatcaccgaaattgtcggtggtgcggcagcattagaataagaaacgcgggaggaaaataacaactatgagtatgggaaaagttgtccaagttattggtcccgttgtcgatgtcgaattttctttagatacgactttaccagatatcaataatgccttggttgtcaacaaagggaacgacgaatctgtcgtcttagaagtggcacttgaattaggtgatggggtaatgcgtactatttcaatggaatcaactgacggtttacgtcgggggatggctgttgaagacactggtcgtgcaattaacgtaccagttggtaaagaaactttaggacgggtatttaacgttcttggtgaaacaatcgatggcggcgaagaatttcctgcagattttagacgggacagtatccaccgttctgcacctaaatttgaggaattaaatacaagttcagaaattcttgaaacagggattaaggttatcgatttacttgccccttatttacgaggtgggaaaattggtttgtttggtggtgccggtgttggtaaaaccgttttaatccaagaattaatccataatatcgctgaagaacatggtggtatttctgtctttactggtgttggtgaacgaacacgtgaaggtaatgacttatactttgaaatgaaagaatcaggcgttttggaaaagacagcgatggttttcggtcaaatgaatgaatcacctggcgctcgtatgcgagttgccttgactggtttaacaattgctgaatactttcgtgatgttgaaggccaagatgtgttattgttcatcgataacattttccgattcactcaagctggttcagaagtttctgccttattaggacggatgccttctgccgttggttaccaaccaacattggcaacagaaatgggccaattgcaagaacgaatcacgtctactaaaaaaggttcagttacatcaatccaagccatttatgtgcctgctgatgattatactgatcctgcgcctgcaacaactttcgcgcatttggatgctacaactaacttggatcgtaaattaacacaacaggggatttatcctgctgttaacccactagaatcaacttctagtgctttggatccagaaattgttggcgaagaacattacgaagttgcttcagaagtgcaacacgtcttacaacggtatcgtgaattacaagatatcatctcgatcttagggatggatgaattatctgatgatgaaaagattatcgttgcgcgtgctcgtcggattcaattcttcttatcacaaaacttccacgttgccgaagccttcacaggccaagccggctcatacgtgccagtaaaagatacagtggcaggcttcaaaggcatcttagcgggtgactatgatgatgtccctgaagaagcattccggcttgtcgggaatattgatgctgcattagcaaaagctaaagaattgggttatacaccatccgaacaaaaaacgaaacaagcttagaaaggggcgttaatgatggcagaagaacaaaaggtattaaccgttaatatcgtgaccccaagtgggattgtctatgatcaccacgcaacattgttggttgtaccagcgatggccgggcaacttggtattatggctaatcatgagccaattattacccctttagaaattggtgagattcgcgttaaacggactgatgatccagcacgtgaagacgcaattgcggtcaatggtgggttcatggaagtgagccataacgttgcttcaatcgttgccgatagtgctgaacgggcgcgtgatattgatattaggcgtgcgcaaagtgccaaggaacgtgctcaaaacgcaattaaaacagcgtccgaacataatgatactgacgaattacgccgggctcaaattgcactgcaacgtgcgataaaccggattaacgttaagaatcacttattgtaggattcaaaaagccttaaacctgaatggtttaaggctttttttgtttcttaagattcagtctggtgggcagacaaatcctattttggtatgttacaatgtttgcatatcacaaaaggggcgttatttaagtgcaatcaatcgggttacaggcagttatttcaattattagccatattggttttattttaatcagtttttatggcttacaatcaatccggtttgagcaatttttcaaaccgaatcatatccgtcaagtacagattgtcatagtatttctcgctattgtgatgggctacaccgttagccaattctttttagaaataatcgcgcaggctaaaaatgtgatttttttagtcccataaactagcagtcttattcggagggaaactcttggaaaaattgattatacaaggcggtcaacgattagttggcgaagttcaaatcgaaggcgccaaaaacgcagtattaccaattatggcggctgccttactagcaaccgacggacccgttcaattaacgaacgttcctattttatctgatgtcttcatgatgcaagatgtattaaagagtttagatgctaaagttgagtttgatgaacaacggaaccaattaacaatcgatgccagtggtgatttgaattttgaagcagcttttgaatatgtttcaaaaatgcgtgcttccatcgttgtgatggggccgttattagcgcgcttaggtcacgcacgagttgcgatgccaggtggttgtgctatcggttcgcggcctgttgatttacatttgaagggttttgaagcacttggtgcaaccattcatcaaaatcatggttacattgaagctaaagcagaacgcctagtgggaactaatatttacttagattttcctagtgttggtgcgacacaaaacatcatgatggctgcgacaatggctgaagggacaacggtgattgaaaacgttgctcgtgaacctgaaattgtggatcttgctaatgtcttaaacaagatgggtgcgaacgtttttggcgccggaactgagacaattcgggtggaaggcgtaaccgctttacacgggacggatcacagtatcgtgcaagatcggattgaagccggaaccttcatggtagccgctgcggcaacacaaggaaatgtcttgattaaagaagcgattgctgaacacaataaaccactcctatcaaaattagtggaaatgggtgcggaagtgattgacgaagaagctggtgttcgaattattggtcccgctgaattaaaggcatgtaatatcaagacgctaccttatccaggctttccaactgatatgcaagcacaaatgacgacacttcaattacttgctaagaagacgagtgttatgaccgaaacggtatttgaaaatcgtttcatgcatttggaagaactccgccgaatgaatgcggattatcaaattgaaggtcaatcagttgtgctttatggcgatacacatttcaatggggctgaagtggctgcaaccgatttaagagctgccgcagcacttgtcattgctgggttagtagctaatggtgaaacgttggttacgaaccttcaatacatggaccggggttactatcatttccatcaaaaattacgggcacttggggcacatattagtcgagctgattttgatgctgccggtcaccggattaaacaagcaaaacgtgcataaaacagactggcggcgcctgctatttcagcggacgtcgcttttttattttgccaaatcaggatactaaaggtacctgtcttatggtataatgatttactgaatatagttctcggaaggagcaacaccaaatggctaaagatatcgggattgacttgggaactgccaacgtcttaattaacgttaagggaaaaggcattgtcttaaacgaaccttcagttgttgcgattgatacccaaaccaaaaaagttttagcagttggctcagaagcgtatcggatggttggccggacacctggcaatatccacgctgtccgtccattaaaggatggggtcatcgctgatttcgacattacagaagaaatgttagcgtattttattaataaattaaatgtaaagggcttcctatcaaaacctaatattttgatttgctgcccaacaaatattacatcaattgaacaaaaagcaattgttgaagctgctgaaaaatcaggtggcggcaaagtcttcttggaattagaaccaaaagtcgcggctgtaggtgctggcatggatatttttcaaccacgcggtaacatggttattgatatcggtggtgggaccagtgacgtcgctgtgctttcaatgggtgaagtggtcacaagtcgttcattgcgtcttgcaggcgataagatgaatagtgaaattgccgcatacgttaagaagaaacataatctattaatcggcgaacatacggctgaaacaattaagttaacaattggtaacgtttggcatgctgatgcgagtgagtcacttgagattcgtggccgggacatggtaagtgggttgccacaatctgtctcaattagtgcagatgaagttgaatcagccttgcatgaaacaatgatggaaattattgcggctgccaaagaagtgttagaagtgacaccaccagaattatctgcagatattattgatcggggaatcatgttaacgggtggcggtgctttattacgcaatatcgctagcttattctcagaacatttgaaggttccggtggtcttagcagaaaatccattggatgctgttgctttagggactggcatcttattagataatattgaacataaacgcgcttattaagccgcattctattaaagaaggattgtgattgtgtgtatcaatcaaattttgacgaacacgtcaaacccgttttaaagaaaattttattggttttcgtgctcataattattgcgttattagttggtcagatgattggttttgcaattggcggccagaatccatttgccgttttcttgcctagcacatggagtcatattattaatttcttgcagtagcatgcgctaaagtgaggtagataaattgcggaaaatattgattggattggtccgtttctatcagaagggaatttcaccattattaccaccgagttgccgatattacccaacatgttcgagttacatgattcaagcaatccaaaaacatggtgctattttgggtttaatcatgggcatcggtcgtatattgcgttgtcacccgtttgtacggggcggctatgatccagtaccagatcatttcaccgttttgcgcaatcgacagcaagacgagtcacaaaagtaagtcaaagaagttaggggttcaacataactatgtcaaaaaaagaacaaaaaattactgtcacaattgatgacatcaaacgtaatggccaagaaatgacaagcgtcatggtcggcaaaaatgaaattggcgtgattgtagaagatagcgctaagaaacgttttgaagcaactgttgaagggactggtcaaagtatcattactaagacccacgacgatgcagttaacgaattactacgggagtaccacttacaccaaggttaattcttaagaattaattagaattacagtaacccggcagaattctggccgggttatttatataatgagagcagaattgattgaaggagacttagcatgccaaaggaagtagaaacaacagaagattcctcgcgagttgattatggaatcgtcttttcagtctttatgctagcgttgattggcttgatgtcaatctatgtggcaacgtcacatgatacatcaggtgcgagttcaactcgagccgttattatgcaagctgcatggtacgtgattggtggaattgcgattgtcgcaattatgcagtttgattcagaacaactatggcggattgcaccactggcttatgggttagggattttcctcttgattgccgttttaatcttttataatcgggcagtcgccttgcaaactggggcaaagagttggttctctcttggaccaatctcatttcaaccatctgaagtcatgaaaccggcatatattttgatgttgggcagggtcgttactcaacacaatacggcttatccagaacacacggttaagacggattggatgttacttggacgaatgttactatggacacttccagtgatggtcctattgaaattacaaaatgactttgggaccttattagtgttcgttgccatcttaggtgggattgtgcttgtctcaggtgtgacctggaagattttagccccagccattgctgtcttagtcgctgttgggggcacggcccttacactagcggcgacgacccctggccgggtaatcttgacgcatctgggctttaaaacgtaccaattcaatcgaattgatgcttggctgcatccttttgataatactgccagtaccagtttacaattatcgcagagtttaaaagcgattgggtctggtcagctatttgggaaaggcttcaatcaagtgcaagtccatgtgccagtacgtgaatccgatatgattttctctgtcattggtgagaacttcggctttgtcggttcatgttttgtgattcttttgtacttcttgttgatttaccaaatgattcgggtcacatttgatacgaagaatgaattttacgcgtatgtctcaactggggtcatcatgatgatcttattccatgttttcgaaaacattgggatgagcgttggtttattaccattgacagggattccattgccgttcatctcacaagggggctcgtcattattggggaacctaattggcgttgggtttatcatgtcgatgcggtaccattataagagttacatgttcagtgaagctgaagatactttctaggagtgaatgacggatgacgatgaataataatgattatttttggacagaggaaattgcagcatcgattagaagaattgggatcaccaaagccgcacaaaatgagtttgggttaatcaagtttgttgatgttccaatcgtggggcaaaaattgacggctaatgaaaccttagtggccattgaagctgagaagatggtacaagatcttgacagtccactagctggtgaattagtaaacgtcaacacaccgttagctgataatccggaattattaaatgcagataacgaaaaagatgcgtggattgctgacattcgggtcgattaggccattacttaaacaataatctgatttttttgaatagtcttgcttgacttttaattgaactttaattatgataggtactacttaatacaagcgatgaaaagatgagtaatttagtcagtagcattttaagagagtccggtcaggtgcaagcggataatgtgaaagctagatgaatatggtctttgagcaattcatttggtaaggtttaactgagccgaatgcgggggttgcccgatatagcgaacgagtatcaatcgggtactttgtaaggcgattactgtgaggtaatcgtaaattaaggtggtaacacgcatttagcgtcctttctctcatttatttgagaggaaggattttttttttggcattttttaaaagaagagggagcgattagtatgttgacattaaaacaagtgggtaaaacctttgagcgagaacaaaaaacattcgccgcactaacggatgtctcgttgaacattgaagcgggcaaaatctacgggattatcggttattccggcgctggtaagagtacgttgatccgactcttgaatggacttgaaaagccaacgactggggatgtgctcgttgagggccagtcaattgtggggttgagcgaacaagcaatgcggccgattcggcagaaaattggcatgattttccaacactttaacttactctggtcaaagacagtgttagaaaacatcatgttgccactaaaattagccggggtacctaaggcagaacgacaaatcaaagcccgcgcattattaaagattgttgaattgacccatttagaagcggcctatccaagcgaactatcgggcggtcagaaacaacgggtcgcaattgcacgagccttgattagtgacccgaagattctgttatgtgatgaagcgactagcgcccttgatccgaaaacaacgaattcaatcttaacgttactggctaagattaatcgtgaaatggggattacaatcgttcttgtcacccatgaaatggatgcggtgcggcggatttgccaacgaattgcggtcatggaaaatgggcggttaatcgaagaagggactgtgcacgaaatctttgaaaaaccacaaatggctgcaaccaaggcatttgttgctgaatccttagtggtgtcgccaagtgaaacggccgcttcgattgatcaactgttagaacgggttccaaatggcacaatcgtccaactgcgatttaacgaagaacaatcgagtcaaccggtgatcggtcgcttgatgcgtcaatacccagcagtcgaaatcagtgtcatcagtgggagtttacaacaaaccattaatggcgcacttggctatttatacattcaaattcaagctaatccaagtgatttaaaggcagtccttgcagaattagcacaacaaacaatcgaagttgaggtggtacgtcatggataacgtaaacggatttcaatcctattttcaatttaagcaagtgaactggccaagtatgtggcaagcaacttttgaaacagtttggttaacaattgtcagtgttttattggtggcagttcttggattcgcactcgggttagttctttatcaaacaaacgcgagtggtggtcgagtgaatcggctgttgaatggcattgtggctttattagtgaacgtctttcgttccattccattcatcattttaatcgtcttgttgattccattgacaaaaggcttgatgggcacgatgattggcccgaaagctgcgattccagcgttaatcatctcagccgcgcccttttatgcacgactcgttgaattagcttttcgggaagtcgatggcggtgtgcttgaagccacccgttcaatgggcgcttcaaaagtccaaatcgtctggcaagtccttttaccagaaagcatgccggcgcttgtttccggcttaaccgtcaccgcaatttcacttgttggttataccgcaatggcgggggtgattggtgccggtggactgggaaatcttgcttaccaagatgggttccaagctaaccaaaatgcgattacgttagtcgcaaccgtcattattttaatcatcgtcttcatttgtcaaaaaacgggcgacttggttgttcaacacattgatcatcgttaatttaaaaggaggagttttcatgaaaaaacacagtttaggattattagcagcagtcttcttattagcgggcgcacttgccgcttgtggtaacaaagaagcgaagtcagacagcaacacaatcgtcgttggggcatccgcaattccacacgccgcgattttgaaacacgttcaaccggagttgaaaaaagaaggcatcaacctcaaagtaaaagtcttcagcgattatgttttacccaataaagctttagcgagtggcgaattagatgcgaactactaccaacacaaaccctttttgaagaaggccaataaagataacggctacgacttagtcagtgttggcagtattcacttagaaccgctcggcttatacagtaaacaagttaaaaaattgagtgatgtgaaatcaggtgcgaaagtattagtttcaagcagccagccagactggggccgtgttttaacaattttaaaagacggtggcttaatcaccttgaaatcgggcgtaaatgctgaaaacgcaacgtttaaagacatcgctagcaatcccaaacacctcaagtttgagtacacattcgaaccaaaactcatgcctgaacttttgaagaatgatgaaggcaccttagtggcgattaactcgaactatgctgtgcaagccggtctcaaccctgaaaaggatgctgtggcccttgaaaagcaatcttcgccatttgccaacattgttgtgacaaataaaaaagaccgcaataacccagctatcaagaagctcgttaaagcgctcaaatcaaaatcaacgcaagaatggattaagaataaatggcacggcgcagtgttaccagttgaataatgatcaaagacaagtcattaagacttgtctttttttgctgttagcatgtgtaattcttaatttaattggaaaaagcgggttaaattggatatactatcattgaatataaacttttagggggagtaagaatgagtcgtccgtataatattggtttagatattggtactagttcaattgggtggtcagtggttgatgaccaaagtaagttggtcagtgtaagaggtaaatatggttatggggttcgtttatacgatgaaggacaaacagccgcagaacggcgcagctttagaacaacacgtcgccgattaaaacgacgtaaatggcggttaggattgttaagagaaatctttgaaccctatatcacgccggttgatgatactttttcttgcggcaaaaacaatcaaacctaagtccgaaggatcagcgaaagttacatccacagacaagtttatttaatgatcgaacagatcgggcattctatgacgattatccaacgatttaccatttaagatataggctaatgaccgagaaacgtcaatttgatattcgcgagatttatttagcgatgcatcatattgtgaagtatcgcgggcactttttaaatgaagcgcccgtctcatcctttaagagtagcgaaattaatttagtggctcattttgacagactaaacacgatttttgctgacttgttcagtgaatctggctttcaactagagacggataaattggcggaggtcaaagcgctcttattggataatcaacaaagtgctagcaatcggcaaagacaagcattatcactgatttatacgccaagtacgaataaggcagttgaaaagcagaataaggcgattgcgacagaattattaaaagcaatcttggggttaaaagcgaagtttaatgtgcttactgggatcgaagccgaagatgttaaagcatggacactcacttttaatgcagaaaactttgatgaagaaatggtcaagttagagagtagtcttgatgataatgcccatcaaattatcgaaagcctacaggaactttattctggtgttctattggcgggaatcgttcccgaaaatcaatcattgtcgcaagcgatgatcacgaagtatgacgatcatcaaaagcatttaaaaatgctaaaagcggtacgggaagcgttagcacctggagaccgacagagattaaagcaggcttatgaccaatatgttgatggtcaagaaaatacgaaggcctattcgaaggaagatttttacggagatatcacaaaagccttaaagaacaacccagatcatccgattgtgagtgaaattaaaaaattaattgaacttgatcaatttatgccaaaacaacggaccaaagataatggggcaattccgcatcaactacatcaacaggaattagaccggattattgagaaccaacaacaatactatccctggttagcggaacttaatcccaattctaaacggcaaacagtcgctaaatataaattggacgaattagtggcctttagagtaccatactatgtggggcccctgattacggctgagcagcaacgacaaagctccgatgcgaaatttgcgtggctgattcgtaaagcagaaggccggattacaccgtggaacttcgatgataaagtggaccgtcaagcatccgctaatgaattcattaagcgcatgacaacgactgatacttatttattggctgaagatgtactccctaaacagagcttaatttatcaacggtttgaagtgttgaatgaattaaacggacttaagattgatgaccaaccgattacgacggagttgaaacaagcaatatttacggatttatttatgcaaaaaataagtgtaacagtgaaaaatattcaggattacttggtatcagaaaagcgctatgcaagtcgtcccgcaattactggtctatccgatgagaacaaatttaatagtcgattaagcacgtatcatgacttaaagaagattgttggagatgcggttgatgatgttgataaacaagccgatttggaaaaatgtattgaatggtcaacgatttttgaagacggcaaaatatatagcgccaaattgaatgaaatcgattggttaacggatcagcaacgtgtgcaattagctgctaaacgctaccgcggttggggtcgtttgtcggctaaattattaacgcaaatcgtcaatgcgaatggacaacgaattatggacttactctgggatacaacggataacttcatgcggattgtgcactctgaagactttgataaattaattactgaagctaatcaaatgatgctagctgaaaatgatgtacaagatgttatcaatgatttatatacgtcaccacagaataaaaaagcgctccgccagattctgcttgttgtcaatgacattcaaaaggccatgaaaggccaggcgccagaacggatattgattgaatttgcgcgcgaagatgaagtgaatccacgactttcggtgcaacgtaagcgccaagttgaacaagtctatcaaaatatcagcaatgaattgctaaataatactgaaatcagaaatgaacttaaggatttatcgaattctgcattgagcaatacgcgcttattcttgtacttcatgcagggtggtcgggatatgtatacgggtgattcgttgaatattgatcgtttatcgacgtacgatattgatcatatcttgccacagtcgtttgtgaaggataattcgttagataaccgagttttagtttctcaaaaaatgaaccgtagcaaagcagatcaagtaccgaccgactttacaagcgttgaacttggtaagaagatgcagcttcagtgggaacaaatgttgcgtgctgggttaattactaagaagaaatacgataacttaacgttaaatcctgatcatatcagtaaatacgccatgaagggctttattaatcggcaattagtagaaacacgccaagtcattaagttagcgacaaatctattgatggaacaatatggtgaagacaatattgagttaattacggttaagagtgggttaacccatcaaatgcgaacagaattcgattttccgaagaatcgtaatctaaataaccatcatcatgcattcgatgcttatctgaccgcattcgttggtctgtatctattgaagcgctatcctaaattaaaaccttattttgtatacggtgagtatcagaaggcaagtcagcaagataagtggcgtaactttaattttttaaatggtctaaagaaagacgaattggttgatgaaaatactgaagcggttatttgggataaagaatccggtctagcttatttgaataaaatatatcagtttaagaagattctagtgactcgcgaagtgcatgaaaattcgggagcgctatttaatcaaacgctctatgcggctaaagatgataaagcaagtgggcagggcggcaagcaattgattcccgctaaacaagatcgaccaactgcactctatggtgggtactcagggaagaccgttgcctacatgtgtattgtacgcattaaaaataaaaagggtgatctctataaagtctgtggtgttgagacaagttggttagcgcaacttaaacaactgacggatgaagactcacaaaaggcattcttaaagcaaaaaattagtccgcaatttacaaaagtgaaaaaacaaaaaggaacgattgtgaaagtggtcgaagactttgaagtcattgcaccacatatcctaatcaatcaacgtttcttcgataatggtcaagaattgacattgggctctgcgacgtataaacacaacgagcaggaactgattctcgataaaacggctgttaaattattaaatggcgcgctacctttaacacagtctgaagaactcgctgaacaagtttatgatgaaatcttagatcaagtgatgcactattttccactgtatgatactaatcaattcagagctaaattatctgcgggtaaagcagcctttatgaagttaccgtggaagagtcaatgggatggtaataagatggtgcaggttgggcaacaagttatattggatagagttctaattggattgcatgcaaatgcggcagttatcgacttaggggtgttgaaaataagtacgccactaggtcaaatgcagcaaccatcagggatttctctttcacctgatacccaaattatctatcaatctccaaccggtttattcgaacgacgagtagctttaagggatttataaataaataaagctagcctgtcattagtgtaatgatgggctagctttttggtttgaaggcataaaaaaaggcctcataagaggctcagaatagaaaacttggtccgaagaccttgtttgattttaactcagagtatcaaatcaatgagtatttcgattgagtgtatcaagctcaacaacagcattatagcatgtcatcattttgaaaacaaggatgtagggggtaaatttttatgagttggcgaacagttgtgatttcacaacatgcaaaggtttcttattctggacggaagattattgtccagacaaaagatgcaacacaccaagtaccaattgatgatatccaaattttgttagttgcgactacccaggccgttttaacggcatcggcgattactgagttgagtgaagctggcgctaagattatttttacaggcaaagacggtaatccaacttgcgaaacaattgcggattatccaggaaatcgtagtctcgcgtcgatccagcaacaggttgaatggggaacggggttgaaagaaaccttatggacggcgattattcaagccaaaatagcgatgcaaattcaatgtgcacaattgttaggaaaggatattgaagacttaacaacagaagctgatgcaatggtatttgctgatcgaacaaatcgagaagccgtgattgcgcgcaagtattttcagttagtttttgataaagactttgttcgaacggagtacagtcccattaatgcagcccttaattatggttatagtttgttgttatcagccgttaatcgcgaaattgtttgtaatggctatttaacacagtttggcattcatcatcacaatggcgtcagtgattttaatttgggttccgatctaatggaaccttttcgaccagtgattgattattgggtggcacatcaaaagtttaatgaattaacccctgatgttaaatttggtttagtggagttactgaatcttgagctagaatataatggacagatcacaattcttagaaacgcactcactaaacacgtacagaattgtttgaaattcatgacaactccgaaagaagagtttgaagtaaaggtggtaatgactcacgaggtaccgaataatgcgcttattagtcatgtttgatttaccagttgaaacgagcgaggatcgcaaggcataccgtcattttagaaaagcgctgcttaacgaaggttttttaatgattcaatattctgtttatgttcgagtttgtgtcagcaaataatcggcgcagtttatcgagaaccgaattgctggctttactccgcctgcaggcttagtacaaacgttgatggttactgagcaacaatataataaaatgcatttcttagtgggcgaatcgagtgatgacgtccgtaattctgctgagaggacgttaattctatgaacattactttttatccataccacccctttagcgttcagaataagaaaataacggtttgcagtacaagtagtccagaagtgtataccaaactcattattggaatgtccggcgcacaagagaccgttaaatttagcaatgatcaatacgaattaatggattattcaaaggctgttatttggggtggggatgtggcagcaattaatttgaatcatctatttcaaaatcggttgattaaaaaattcgccgccgacttaacggatcagcagcgccagaaattaactcagttagatagtgagattcgttcaacgattttggatgcggcctttatgtatgaattgaccttagatgtcaatcaggaatgggatcttcaaagaatgattaagttctataatttacaattttcgactgtcgtccaacatgacccatatggtataattgagagtatagtacagacagcagtagagttaaatgaatcaaaaataatcacgttgatcaatgtttcgcactatctcagtatcaaccaatttaatgaattggtgaggttggtggcgacattgaatgtgaaactctttctcattgaattttcagaagaggttaaatctgatcagtaccagaaatgttgttattatcacatcgataatgattatgtcgaatggcgctatgaataaaatgaaattctgatgaaaaaacaacggttttagaagagtatcaaatcaatgagtagttcaacaaaattggaaataagtgggttgtaacatctgttttagaagagtatcaaatcaatgagtagttcaaccggttaaggagattcttaaacgttacccaggttttagaagagtatcaaatcaatgagtagttcaacctgtaattaattggaaagatagcggagacagttttagaagagtatcaaatcaatgagtagttcaacattatcccaatggacatgatgctttgcctcgttttagaagagtatcaaatcaatgagtagttcaacagccaaaagccacatggtattataaatatagttttagaagagtatcaaatcaatgagtagttcaacaccagcaagcgtttaaacttaaaaaggtgggttttagaagagtatcaaatcaatgagtagttcaacctatgatattgacgacgccaaagcaacagcgttttagaagagtatcaaatcaatgagtagttcaacaaataatggacatggttaaaattacaaacagttttagaagagtatcaaatcaatgagtagttcaacaaggattcattttcaatctaacacatggttgttttagaagagtatcaaatcaatgagtagttcaacaaataacgggttgttttgattgacgctcaagttttagaagagtatcaaatcaatgagtagttcaacatactcctttaaactccaatgccaattaatgttttagaagagtatcaaatcaatgagtagttcaaccggtattgtggctgaccaaatggctcaacggttttagaagagtatcaaatcaatgagtaatattaacctatttcccgtgcgaatctattgaaaaagatcacgttgtccgcgtggtcttttttcatgcattcaagcattgaaaacagttctcaattagcatagaattaagagcgtataataattgctagaatgcgattcttggagggtcatctatgtctaaattagagattatcgatttgcacgtcggcatcgacggtaaggaaattttaaaaggtgttaacctggaaatgaacacgggtgaaattcacgcgatcatgggacctaacgggactgggaagtcgacgctttcggaaacgattatgggcaatcccaagtatgaggtactacaaggtcagatcaaactagatggccaaaatattttagaaatgccggttgatgaacgcgcccgtgcggggttatttttggcgatgcaatatcctgctgaaattcaaggggtaacgaacgctgaattcatgcgtgcggcgattaatgcacgtcgggctgaagatgatcagatttcagtgatggctttcttgaaaaaattagatcaacggatggcattcttggatatgacggaagaaatgtcagaacgttacttaaacgaaggattttctgggggtgaaaagaaacggaatgaaattctgcaattgatgatgattgaacccaaattcgccatcctagacgaaattgattccggacttgatattgatgccttgcaagtcgtttcaaaaggtgtgaacgaaatgcgcggggctgattttggctcattaatcatcacacattatcaacggctcttaaactacatcgtgccagattatgtgcacatcatgatgggtggcaaaatcgtcacgactggtgatgcgtcacttgcaaaacgtttggaagacgaaggttatgtcgggattcgtgacgaattaggcttggatatcaaactgactgacgacgaaagtaaatagggggcgattctgatgaagaaaacattagccatcacgcctgaacaaatcgcgtcattctcacaattgcatcaagaaccggcctggtttgctgaaatgcgtcaagcagcgtttgcgcaaattgagcaactcgaactgcctatctttgaaaaaattaactataaacattggccagtgatggcagcaaatgcgccaacagccgttaaatccgatttgagtttaatgccatctgcggcagcgaatctttcagctgatcaaccgtacgcagtacagattggtcagacaactgccaagttaaatttaccggcagaattggcagaacaaggtgtcatttttaccgacattttcaccgcgttacaagaacatcctgatttggtacaacaatactacatgcaagtcacagtgaaaccgaacgaggatcgcttaacggcttttcacacagctttgatgaacagtgggctcttcttgtatgtgccgaaaaatgtggtgattaagcaacccattacggcttattatgtacaggacagcactcaacccgctgattttattcatcacgtcctcgtagtagccgaacaaaacagtgaatttagttatcttgaaaatctccaaacagcgggtgaccacaagaacttagcaaatgttgtcgtggaagtgattgctaaagataacagtcacgttcatttttcagcggttgatgcctttggaaaatccgtgacgacttacttgaatcgccggggccacttgatgcgcgatgcgcggattgattgggcattgggatcaatgaatgatggcaatatcatcggtgactttgattctgatttagtgggtgctggatcacatgctgaaacgaaagtggtcgccatctcaactggtaaacagattcaagggattgatacgcgtgtgacgaatattggaccgcgttcaattgggcacatcttgcaacatggcgtcattttagaagatgcgacgctaacgtttaacgggatcgggcatattttaaaaggggctaagggtgccgatgcccaacaagaaaatcgcgtcttgatgttatcgcggacagcacgcggggatgcgaacccactcttattaattgatgaaaatgacgtgcaagctggccatgctgccagtgtcgggcgcgttgatgaacaacaaatgtattatttaatgagtcgcggtctttcaaaagaagtcgcgcaacgacttgtaattcgtggtttcttaggcgctgttctaagtgaaattccggataaaaacgtgcgccaacaattaacggacacgattgaaaggaagttaatcgatggtcaaccagttaaatgattatcggtgcgactttccgattttagaccaaatcgtcaatgatgaaccacttgtttatttagacaatgcggcgaccacccaaaaaccacaagccgtgattgaccggttggtggcttattaccaaaatgacaatgcgaacgtgcatcgtggtgtgcatactttagctgaacgagcaaccgcccagtatgaagccgcgcgcacgaaggtccaaaccttcatccatgccgctgcgagtgccgaagtgattttcacaaaagggacgacgcaaagtttgaactgggttgcaggcagtttcggtccaaccgtggttgaagccggcgatgaaatcgtgattagtgtgatggaacatcatagtaatctcgtgccgtggcaacaactggcgcagaaaacgggcgcgaaattgcgttacatcgacttattaccggatgggcaactcgatttagagtcagcacgccaggtgattgggcctaagacgaaaattgttagtttggcgcatgcttccaacgtacttggggttgtcaatccgattaaaacaattgcggctttagtccatgcacaaggcggttacatggtggtcgatggggcacaagccgtgccgcacatgatggttgatgtgcaggcacttgatgcggacttttacgccttttcagggcataagatgcttggaccaaccggcattggtgtgctttatggcaagcaagcattacttgaacagatgccacccgtggaatacggcggcgagatgatcgactttgtgggcttacaatcttcaacgtttaaagaattaccgtggcgtcttgaaggtggaacgccaaacattgcgggggcaattggcttaggggccgccattgattatttaacgcaaattgggatggatcatatccaagcccatgaacaagcgctagtcacaatggctttaccgcagctccaagcaatcgacggcctcacgatttatggcccacaagatgccgcccaacgcaccggtgtgattgcctttaatctcgacaatttacatccacatgatttagcgaccgctctcgatatggaaggcgttgccgtacgtgctggtcatcactgcgcacaaccgttgatgcaatggttgaacgttgccgcaaccgcgcgcgctagtttttacctctacaataccgaagcggacgtgaaaacgttcgtgaccgccattcaagcagcaaaggagtttttccaaaatggcactctctaaattagataacttatatcggcaggtcattcttgaccattcgcaacatccgcatcatcatggtcacttgacgactgccgatcatgaaattgaattacgcaaccccacctgtggcgatgtgttacaacttgaactggtgctcgaagacgggcagattagtcagattgctttttcaggggaaggctgtacgattagccaggcttctgccagcatgatgaccgatgccgtgatgcataagacaccggcgcaagcggaggcgatgatcgaacgcttttcggatatgatgattggtgatcgtgacgaagactggtcattgttagaagatgccgcgattttacaaggggtgcaacaattccctgcgcggattaaatgcgcgactttagcttggaaggcgctccacaaagccttaaatagcgatgaccgacgtgcaacaaccggtcaaatgatgaaccacgcagaaacggaggaaactaacgaatgacagaagagacaacgatgccccaatttgaagagtacgactacggctttagcgacgatgtagagcccgtcttttcaactgggcgcggtttaacggaagacgttgtgcgcgccatctcgcgtgagaaaaaggaaccacaatggatgttagatttccgcttaaaatcatttcacgcttatgaaaaaatgccaatgccagatttcggaccggacttatccgatcttgatttagaacacatgttgtattatcaaaaggcaacggacaagcaataccgcgattgggaagatgttcccgacaaaatcaaagaaacgtttgatcgcttaggtgtgcctgaagccgaacgtaagtatttagcaggttccagtgcgcaatatgaatcagaagtggtttatcacaacatgcgtgaagaattcgaaaaacttgggatcatttttaccgatatggataccggtttacgcgaataccctgaaattgtgaaggaatacttcagtacgttggtcaaaccaactgataataaattctcagcgcttaactcggccgtttggtcaggtggcacgttcatctacgttccaaaaggcgtgcggacggatattccaatccaatcgtacttccggattaacgccgaaaattcaggtcaattcgaacggacattgattattgtcgatgaaggcgccagcgtgaactacgttgaaggctgtactgcaccaagctattcaagtgatagcttgcacgcagcggtcgttgaagtctttgtgaaacgggatggctattgccgttatacgaccattcaaaactggtcaaagaacgtttatagcttggaaactaaacgggcccaagccatggaaaatgcgacaatggaatgggtcgacgggaatctcggttcgaagatgaccatgaaatacccaagtgtctacctcgatggtgaaggtgcccgcggaaccatgctctcaatcgccgtcgccggcgaaggcgttgatcaagacagtggcgcgcggatgattcacgctgcaccgaatacgtcatcctcaatcgtttcaaaatcgattgccaaagatggcggggccgttgattaccgcgggactgttcgttttgaacgcgacagtgacggttcgtttgcccatgtcgaatgcgatacgattattatggatgaccgctccagctctgatacgattccgtacaacacaattctaaacggcaacgtctcaatggaacatgaagccaaagtctctaaaatttctgaagaacaactctattatctgatgagccgtggcatctcggaagccaaagcaaccgaaatgatcatcatgggcttcgtcgaaccattcaccaaggaactcccaatggaatacgcggtggaattgaatcgattgattagttatgaaatggaaggcagtgtggggtaattgaattgcataagctagaaatgcttatttgaaggcgtttctggctttttttgtttgtgcatgtagaaagtaacaccaaaagtaacaccatttggatagaaatttttagagagatttaactagtatgcagtattaaatggtatgataaaataaaaattataggagatatggattgaagtcaatatttgagacagattttaagagacattcagaaccgcgtttaccttccacagctcaaataaatcattaatcgcgattaataacttatttgaaccctggaaagcattaaatcaggcggccatttggctcgtaagtgttgcaatttcaacttgtaagggggtctggtagcccagtgaactatgaattctcttcctattgtagaaagcatgcacatattcaaaaaggacggcagcggcagtttcataatggatgtaagccaagccgtaaacgcccaccaagtgaacatcaatcaattttgtgccacgtatcttaatcgactagcggccggattggcccaagcggacgaggcgattgttgctcattactgcaactggtcggcgattattggccgacgtctgcaaaatgggcttgtcattacacagcttctagcggatggtacgttaattttgagcgatgactcgcaagtggcagtcggccaaaagattgattttaaggaggagctgatttaaatgacactatcggttgccagaaaagttagcttagtcgaaatgtgcttggcgttattaatggttagcgctcaagtcagtctaccgatttcgctggttccagtaacactccaaacgctcgcagtcggtgtaattggcaccacgttaccatggcgcttaagtcgactggtcatcgggagctatctcatgttaggcatgcttggcttaccggtctttgcaaattatgccagtgggactgcagtgctggtcggaccaacaggcggctacctgataggctttatcgcttatgtggcaattgttcactatagtcagcaactatttggacaatcgaaccgcgtacttctcggcggcaatgtgctagcaagcattattcaactcggatttggcacactctggctaatctggtcattaaaattatccgtagtgaccggcttaatgaccggttttgtgccgtattttccgattgaaatgatcaagagttgcttagtggtgatgattgccagtcgcgttcaaccaattagttaaaaaaacactatccaatcggatagtgttttttagtttaacgctttaattttagcgattaacgcgttatttttaaggtatttggcaaaaactaacgcggtttcgcgatcttctgcatagtctcgaccgctttgttggcgcgcccgagcacggaggtaatacaaatgatcgacttgtttgatgatttgatttttttgactcagtttgagggctttcgtcaaaaactcgatagctgcatcaatgcggtgttggttaatcatataggctgctgtgtgacgcgaagcaaataggacgcgttgaacatcaatgacattgatgtgatcaagttggttgatgaaattgatattattattgaaataaaaatcagctaattcctcgccagcttcttggtaaattaaacccataccggtatttagaagtaacttcaacgttgaagtgtcgtcaccgatggccgctgtgaacgagttataagcggaaaaaatctgtaattcagattgatggtcaaggtaacttaaatagccattgaaaaagaagaagatggcgggataaggatgttcggttgccttgaagtcgatatcggtaattaatgcggcagcagggccagaatcgcctgctaataaagcaacttccgcagaaatcacgccttcgtcactggcagtgtcgagcgcgttaaattcggtgaaaagttcatttaatgtcaatccaagccgtgtacaaatcttaattagaattgggattgtggggggcagatttttcttttcaattttgctgattgtattttgcgtgcaaatccccgctgctaattcagactgtgtcagttgcttgttgagtcgctgttgatggatcaattggcctaaaaacatttttagcctccaaatagtaattatttatctatatttatgattaattatatacgtttaatgcagacaagtatacgtttatgacatttaatccttttaaaaaaattacgtgataaaatcgaaatgagtcaccaatcatgggtattcataatatgaaaggaggggtatgataatgatgagtaacattcaaaatttaattttctggttttggaattaaggttcgagtagggagttttatgcatggcaatgaaaatgccgctggcaatgcagattgtcattaatctaagtacgtttagttcgtttctactattagtattatttttgacggggaagttgaaacgaacgaacagatttcaactactattatcagttggagtcggcattgcttttgttcagggaatggatttattaattggaaattttcttgaagagctatggctgattttggcaactgttggattatatggttggttaaatggctttaaaaatctgcgtaaattaaagacaagttatgcgttaattatcgcaaccatctttagttacatcatcgtgatgctatcatcggttctgacaacggtggggttaattgggtatactcacttaaagggccttgataatctgatgagtagccagtttaattggcaaatggtgtgtttaattatgttgagtcaattattgattgcagccggattaggattaattgtccaacggttagatcagcttattaaagtatccattgcttcatacggtatgtgcgtggccggcacgattttagccggtctcgcgttatttgtggtggcagtgatggtgctttttgatagctttaagcatgcgaatctgccggttgaatatttgtaccttgtgttaggacttgtgctattactattagttttggtgattgtgggaatgcttttgtatacgaaagctgtgattcgccaaaatagaatcaacgtagaacaagaaagtcagcgaaatctaacgctgtatgttgaacagttagagcgtaactaccgtgaaatacgcaagtttcgccacgatatcgccaatgctttattggctttagagacaattatcaatgaacaagggagcccagttttaatgcaggattttcatgatttactaacgcattataactttgacacgattcaagatcaggcaattggacggtttcaagagattaataatgcttatattaaaggcattatttttagcaagtatattgaagcacataataatcggattccctttaatttagaggttcaaccggatttatttaagcaacaacagtattttgatgaattacggattctgggaatctttttggataatgcaattgacgtggtaaatgatattaaagatggttcaatcagtgtcagtttattcgagcaaaagggtaagatggtctattgtgtcaaaaatacgattaatacaccagtagaatttggtcagctttatcaggctggttattcaacgaaggggattaatcgcgggcttgggctcacaactgctaaagaaatcacggatatgcgctcagattttagcttaatgttaaaacaagatggagactatttcgttgcaatgcttgttgttgaacaggaggagacccatggttgatatttttttatgtgatgataaacaggttttactagatagttatgaagagattataacggcatatattcaacaaaatatattggatgctcaggtgcgtttgaagactaagaatggctatgacctattaatttttttacaagaaagtcaaacgcaagggggcgtttactttcttgatattgatttagagaatgacgtgctggatgggatggaattggcgcttaaaattcgtgaattggatccatatgcacagattgtgttcgtttcaacacatgacgaacttttaatggaaaccattcaacgccgaattaatgttttgaattttattttgaaggatcgcgggttagcacaggttcgtgcagatattcaagcaaccattaacgatgccattaagttacgacaacaacaggtgccattagctgaagaaccagctcattttgaatatgatgatggattatcgtttgaaaaagtggcaattcaagagattaattatttcgaaacagcgtataaagcacggcacgtcttcttacacagtgatcatcggttaagtgaatttgtagggaaaatcgtgacgattcaagcgcaattgccacaatttttcagagcccataagagtatcctagtgaatccggacaaagtcgtacggattgataaggagacgcatcaagtgatatttacaaatggcgatacatgtgatgtttcgtaccgtcgaattgaggcattacttaaattgatacaagcagacaagtgttaaaaattaagcaacgccaaaaattcgctttcaaacgtggtacactaaaattgataatggatgacagttttaggaggctacggattgaaactatatacaaagaccggtgacaagggattaaccagaattatcggcggtcaaaaagtgcgcaaaaacgcaattcgtgtggaagcatacgggggtgttgatgagttaaattcatacttaggtgtcgtcatcagtgatttacctgattatccggcattgagaatggaattggttgagattcaacaaattctgtttgactgtgggacagatttagcgacgccggatgattcgcgggggtatcggacagacaacgcatacacgaaatggttagaagctaagattgatcagtatgcagatgttccacctgctttaaaagaatttattttacctgggggagtaccatcagcagcgaaactacaatattgtcggacaattgcgcggcgtgttgaacgccaagtcgtcgccttgcaggaagtagaaccgattaacgaagctgtattaactttcttgaatcggctctctgattatttgtacgcgattgcgcggtacgtcaatcatgaagagggcgaaccagagacagtttatcgaagaaataaaacaatttttcattaaaaaaaccgccgatgtgcggtttttttaatgtcgaaattaagggatgttttgaattgctaacgcagcaagcttccactataatagcttgaaaagaggaagtgattgtgatgtttaaatcaaaagaagctaaagtcgaggcttacgaaatgctcttaaaacaacaagctgctttgctggcaggtgaaacgaatttaattgctaatctagcaaattcttcggcgttattaaatcaaatattaccggagactgtttttgcgggttattatctgtatcaagatgctgagctgattttaggcccatttcaaggaaacgtctcgtgtatgcacattgcactaggtaaaggggtgtgtggtgaagccgccgcaaagcaaacaacgttaattgtagaagacacggcgcaacatcagaattatatcgcttgtgattcggctgcacgttctgagattgttgtgccaatgatcaaggctaatcaactaatcggtgttttggatcttgataaccgcgtcgttggcgcttacgatgaggtcgaccgagattatctagaacagtatgtcacgttactgatgcaaaactaaaaaaagcaaatgcgtttctaattgatgttagaagcacacttgcttttttttaattgattagagtgtcttgattttttgtttgaggtggacgcaaacctgtgtcaccacaatgattgccaagagccggtccagataatccgtaccggcttgaaccagtgtaatgctgacaaactgatttagtcccaagccgcttagtagttgtacaattaaacttgaccctgaagaggtgataccgtggaacaagaagtaagtgattaatgaactgacaattgtgccgggaatggcgacacctaaagcaacaaggggtaactcgcgtttcgtccgttggtggtggtataagaaccatccagcgagtaagccggttaatagaccgtctggcaagtaataaagcgcaaataagtcggtcgtgacaccgctgatgatgctactgcaagtggcagttaatgcgcctgccagaggacctaatagggtgctggctaaaatggtgccgacgctatcgagatagattggtaaccgtaaaaatagggcaatgttagcgcctacgtaattgagtgcaatggcaagtgccagaatggttaagtgttgtgttttaaattttcgcataataggttccttatctaagttttggtaagtccgttttaatgagggttgcttgtgcatttaaaacgacggtcaaaaactgttcaaagaaacgattggtgtccaccttagttaagatgaggctattggcaggacggtgccagaaatcgaaccggtcaaccagtgtttggccaatgctgatgccggttgtttcgacggtggtataactttcaaagccgtgacaaagggttggatcgataaaataggcgactgctaatggatcattgatcacacagccgataatgtgttcatattgccaatgaaaatcaaaataaaactgggtgatggcttttagatagtcgccgacttcaggattgacacgctgacaataagccagcaatgttggcgtgaagacaatttcgcgggtcacgtctaagccaaccatttcaatcttttgatcgagttggtcgaataccaacagtgcggcatccggatcgctccagtagttgaattcagcaacgggtgagcagttaccgtgactcttataggtcccacccattgaaacaaagcgggcacagtgccgacctaaatctggatttcgctggagcgcagtcgcaatattggtcaatggtccgagtgcgataatactgatatcgctcggttgactaaaagtggctgctaaaaaatcagcggcggattgttgtgccggttgaatagtggataggcgcgggatatggctgtcacctaaaccatccatgccatgcgtatcctgcgcactgacaaatggtttatggagcggtttatccgcaccaacataaacgggaatgtcgagctgcccgaggcgttcaagacacttaaaggcattgtccacgccgatttggacgggaacgttgccgcaaacaatggtgattgcaacgacttccaccgctggcgattgaatggccaaattcaaagcgagcgtgtcatcgatgcctggatcgcaatcgataatgattttgcgagtttgcatttatttctaacctccttgagatccttagttttttattctgggaagtttccgaaccagtccaagtagttttacttgattttaaatgcacccctttatgataccgagttggtgggcgggtgtaaatagcagttatttttaaaaaacaggcttgacagtgattagcgaacttgatattataataaacgttgtaagatttgatatggagaattacccaagtctggctgaagggaacggtcttgaaaaccgtcaggtgggttctgcccacgcgagagttcgaatctctcattctccttaaagtaaaaagcggttcgcggatgcgagtcgctttttttgttgggtaaaataaaaaaccagagtgcatgcgcactctggtcgattcggtttaaaattagtttgtgtaggtttggaaacgacttgcatcggtattgtagtctttagcatcggctggattttcgattgaaccaaatggcatttgcgcacgaagtttccagtttgatggaatgttccattttgcagtaacggcttcatcaattactgggttataatgttgcaagctagcgcccacatttttttctgcgagggctaaccaagtggcatattgtgccatgcctgaagcttgttctgaccatgttgggaagttttcggcatataatggcacgttttcttgaagattcttaacaacgtcttgatcttcaaagaacaagattgtcccgacaccagcggcgaatgaagccaatttagcttgtgtacttgggaagttttccgcaggtgttaatggttttaaggcagttgctgtaatatcgttccaaagtgtttcatttgcttctccaaagagaataatggcgcgtgaaccttgggcgttaaaagcagttggtgtttctttaatggtgttgaagattaattctgataattcagcttcgctcattgaaacgtttttgccaagtgcataaattgtccggcgtgtttgttgtaaatcgaataattctgtcatgttcattactcccttgtgaaatcgtttttatcagtgcatgcgaataatatagcatacttattaaatgtaagcaatgaaaaaagcgaaatccctcgtttgtatttcgcaattaacagcatttagttcgattgtattttacaattatagactagactgcagtttaacgggcaattcagattttgaaacgacagtccaagaattgacgaagcgccccttggcatctaattttaagtagtgattaggttttagtgcgcgcggcgcttggaaaacgacttcgtaatgactgccatcagcacggtaagcaggttgccggtaaaggtaatcgccatgtgcttgttgtgtcccgtattggtgtgctgttttaacatagacggcttctctgggaattaagaggttgaaccggtcccactgttgggcaaggtcattgccgtccgtcatattctgagttgtggctgatccgataattggaccgccgataacaattagtccaagtgagaacagtaatagaatgatttttttcatgattgacactccttgtgaattgatgtcttaatcgtatcaagctagaagttacattgattcagtctaaaggtggaatttattctaagcgaggtgacgattttgtcatatcgtgggcctgtttaaggattgatagtttatgtctgtggccgaatgcattataatagttagttatgagatgttttcagtagagagtgggtgatgattgatgaaggaagttcaaaatgtgatgcaacagttagacgcgattcgtagtgcattgattaaaggggacatctatcaatcaattccggaaaaagtattggtcgtcatggatggcgtccaatataagacgcggcggacacatgtcgtagtacctgaggacaacgagtcagtcttgcaacgaatcacagcaattgatgagcgaattaaaaccaaaggcaaagaagcgaccatcagcgatgaagagctcgatgatttattaaggcatcttgcaagcccagattcgcaagtgcgcgataaaggtgttttttacttattcaatcgattattacggcagacggttttaaccccagcccaattgatttgggtcaagggccgcttattgcaagatgattatttattcgcgcatattttagaacctgaaaatgacgctgtttttttacgttcgtttagcgcgatgtttttggccgggattttatatgctaaccgcactttttatcatgtattaagtacggccgaattattggcaattgaacggcgagtaatggcttatacagtcatcgaattagattcacgaggatacgttgatggtaaaggctgggcgcatgcgatgacgcatatcatcaatgtctggtcagaacttaacgaaacacctgaaatccaacgtgcggataagattttgatgatggcaattgtgctacaggcgtatcgcttctctgataacgcactcgcatatggtgaagatagtcatctgacgaacgttctaatcagtttaatgaacaagcatcaactctatgtcgattattgtttaatcgtcttacaggagtggcagcgttcattgttgactatggcaccacaggagaccgttggtttttggaatcggtggtataaccgcaatcgctttttacagtcattgttgctacaacctgaattacctgataaaattgcggattacttacggaagatttcagatttattttaattaaccagataggattgagagaagatgacagtaaaagggattatttttgacgtcgatggcgttttagtggatagtgaaccgtactattttgaacaacgcttagcatttttgaatgcaattggcgcacgactaacggcagaggaaagtcgtaaacaaattggttccaatatgaatgccgttttaaaacagttgtttccaaaccatactgttttggaacgagcggcaattaaaaacggctatacgtcgtataaagcggctcatccaatcgtttttaaaaatatcatgaacccagacgcgcaaccgttattagcaaccgttgcaccgacatatcaaatcggtttggcgtccgctggtgagcgcggaattattcaacaaatgttgttggaaaccgcgttagaaccttattttgaaacggttgttagtggtgcagagattgcgcataataaaccagcaccagatgtgtatctagaagcgcttaaaagaatgcatttagaaccaaccgaggcggttgcgattgaagactctgcactggggattcaagcggggaaggcggctggtttaaccgtcatcgcattaaaaccatttgatccacttttcgcgattgatcaatcggcagcggattatcaaattgaatcattaaaagaagttccggcaatattagcaacgttataaaaaacggcttccgctgcaggaagccgtttttttgtcgtactatcgaacagcaccttaacaattaattaaagataaatgtttggtaatgtttagtatgtagtgtaaaatacttattggataaaaaaataagtaatgccacataactagttcatagtgtataataaacgcaactagtagcgtcattgctaattgatgtaaattacttaattgggttatattttccggaaattaattttaaattaaataatgatgtaattggagtatttaaaatgagaatattaggggataaactaaaacaaatccgtaaagcacgggggatgtctcaagcggagttagctaaggggatttgtacgcaagcaacaattagcttaattgagaaaaaagaacaggtgccaagcacaaagattctcttggaaatttgtaagcggcttgaaattacgttggactcagtgattgtgcaagaagatgatcaattacacgtcttgttgagtcgtgtgcaagcattgttatttaccaatgaattcaaaaaagcacgtgatttgattcagcagatctacacagatcaactggtcaaagcagatgattacaaacggtattattatttccaaggtcaaattaagttattgctggagaataaaccggacgatgcacttttctttttcaatcgtgccttcaatcaatacgttgtttctcagacggatgtttacggtattctatgtattatcggcattagcaagtcctatttgatgaagggcgctttagagcgtgtacggatttatgcagaacaagccgttgaaatgttggagaattctgatccacttgctatggccgatttccaagttgagttgcagatttataatcacttagcgggaattctttttgaattgaaggattatgaaggtgcgattaagtacgctcagcttgcgattgacgaagcaatcgataagcaaagtctttacttacttgatgcattgtatttcattcttggtcgtgcagaacatgcgcttcatcgagagaacgccttacaggatttaacggttgctaaaacattggcgttaatccggcatcatccagagattattgtgcaagttgatcaacaattggctgaataagtggttaaccactaaaaaaagccgggacataagcgtcccggctttttgattgctaatttatgcttcttcgtgaccaatgctactgcgtttcttgttgagtgcgtgtttattatctaaatctgtccgcacaacgagcacgtcgcaaacggcggtccgagtaacgtattccgttacagaaccaatcaagagacgttcaacagcgtttaaaccagttgcaccaatcatgatgagatcgatatttttcttttcgggtacttcgcgggcaattaaactctttggtgcgccatattcaatgctatagtcaacatcttttaagccaagttcattggcagtcacgatgtattcgtccattgttttcttagctgtttctgtgacttgttcaaccattgcggaatcaaaactagagatattttggaaggcgcgggtatcgataacgtgaatcaagtggagttgtccgttattccgaagggcaacttcaactgctttacggaaagcgagttcagcttcataagaaccatcgattgcgaccaaaatgtgcttgtattgttgtaacattgtcatcacctcatttaattttacatctttattgtacgctagttcagtgccaaaagtaaatcttaaaggttagttgcaaagctaaggccgattaagccggcgattaaactggcagcaacgagcgtcaccaatgtccagactagtggcaatagccagtaaatcaaagccccgcagatcgctacaccgatgagtgcaatccctgaaaagtacatcaatcgacctaaatgccggttttcagttaaatcaaagagtaggaacttcttgtcttggtagtaacataaaatcgcaccaagtagggcgataatgattaaaaaaacgattatggcgatttgaatcaatgtgcaacctcctaaaataatcaacaaaaaagggccaacgtaaacgttagcccggtcaaagtcgttggactttgggaaatctagtggtgccgtagatgcttcccgatagttgagcccgctagaaaatgcaggtgggtcagattattattagacttggttccttcgcgaaaaagtctacactcgctaataactcatccgtcccattaacgaattacttgatcggtcaacataaggtgggaagacgcgcacaccttagaaatcctactattataatagcacgctcgtgatgttaacacaacacttttgtaaccgttcacttatgcggactggcttggcgcaagcgttctagctgttgtttgaggacttgctcgtatttaccagttgcttttgcttcgtaataatgactacctaagagcttatctggtaggtaatcttgcgcgacccagtcgttgggataattatgaggatatttgtagtcgacaccgtggccaagtttttcagcccctgcataatgggcatcacggagatgatcggggacttcaccggctttgccagcgcgaatatcagctaacgcgttatcaattgcggtgatggccgaatttgattttggagataagcagagatcaatcactgctacggccagtggaatccgggcttcgggaaaaccaagttgtttagccgcagcaattgcctcgactgtacgggcacaggcttgagggttggcgaggccgatatcttcgtaggccattgtcatcaagcgccgactaatcgacattaaatcaccggcttcaatcaaacggcccatataatggagcgcagcatcaacgtcactgccacggactgatttttgaaaggcggagatgacatcgtaatgggcatcgccatctttatcatgagtaatggcttttttctgcacgcattcttcaataacgtcaatatcgatgtcgatgacgttggtgtctggattcgctggtgttgaacgagcagcgagttcgagggcgtttaaagcactccgtaaatcaccgtttgtgacgcgggcaaggtattgttcagccgtttcatcgagattgatggctagtgcacctaagcctttttctttatctgtcagtgcccgttgaatggcgacatgaatgtcggcttcagtgaggggcttgacttcaaaaatttgggcccgactccgaatggcagggttgatactgatatatggattttcggtagttgcaccaattaagataatgcggccactttctagatgtggtaagagaaaatcctgtttggttttatccaagcggtgaatttcatcgaggagtaaaatcacggtgccactcattttggcttcttcagcgacaatctgtaaatcttttttactatcagtggcagcattcagcatgcgaaaagcgtactgggtactaccggcgatggcactagcgatactcgttttaccagtaccaggcggtccgtagagaatcattgatgagaggagtttggcatcaaccattcggcgaatgattttttgcggccccactaagtgcgtctgaccgacaacttcatcgatgttagtcggacgcatgcgaaatgcgagaggttgttgcatagcgttcatcctttaatgtttaggttgttcctagtataacatgtcgcgcaaattcgtagtgattatcgttttaaaaggttttagggatgtgtataatgagttgtataagactgaattaagaagaggtttcaaaatgcctaatcaattatttgagaacattaaacaattacgcttaacacctttattgaaccaaggtgcttttggggtcgaaaaagaggggcagcgagtgaccggattgggcgcattgagtcaacaaccgcaccccagtgagttaggatcgcgaacgtttcatccatacattgcgactgattttgcagagatgcaaacggaactggttacggataccttcgaacagaccgtagatgtccaacaacaattattagcgctcgaacaagtattgcaatcaagtatggccgattcggaatatatttggcccctcagcatgccaccgttgttaccagacgatgaattaaccattccaatttcagaatacacaccggcggtaaaagcctatcgtgactatttgacgaagcgctacggtcgacgtctacagatggtctctggcatccattataattttagcctgtcatcgacgttaattgtgcgtttatttgatgaatactatcatgatcactatgtgagtctaaaagattttagcgatgcgttgtacatccagattgcgcaaaattacgtgcgttatcactatgttttaacgtatttatttggtgcgagtccgatagcggaaccaggctttttagaagatatgacgaaattaccagaacaccctgtacggagtttacgctcgagtgaattattcggctacagcaataagcaattattaattcattttgattcagttgccgcatatgttgattcaatgcgccaagcgattgctaatggcgacttaatttcggaacgcgaattttacggaactgtgcggttacggagtcactcattggatcagatgttagagactggtgtggattatttagaatttcgggggtttgatattaacccgtatactgcgacggggattgatcaacaacagctagacttcttacacttattctttatgtacttattatccttgccgaaattatccggtgatttagccactcagattcagacgggtcgtcagttaaatgacacagtagcattagagaatccgctgcagccatcgcagctccaaacacaattgaaaactgtgatggccgatttggcccaattcattacggattatcatctgaatgagcgttttaaacaagcttggacagtgatgaatgagcgtgttcaggaccatcgacaaaccttgagttatcgcttaacacaagcgattgaagaggactcgctaaaggcatttgccctcaaacaggcaaaacgttttaaatgtgagctgacagagactccctatcagttacagggatacacggatatggaattatcaacacaaatgctgatgtttgacgctttccaaaaagggctgcatgtggctgttttggatcgcgatgaacaatttattgagctgacctatcaacatcatcatgaattagtcaaaaatgggaatataacgagtttagatcggctaattagtgggccgttagtggataataaggtagtgactaaaattttattggcaagtcatggtatgcgggtgccagcgggtgccgaatataccgctttagagacggcagtagcagattatcaagcggcgtttggtcagcgcgcgattgtcattaaaccaaaacacagtaacatgggggcgggcattaccacatttttaacgcgtccaagtgaagcggacttcattgctgcttttaaactggcacaaacgtatgatcagcaaattttagttgaagaattcattgcgggttcggaataccgtttcttagtgatgaatcataaggtccaggctgttttagaacggattccagccaatgtcgtgggggatggtcgttcaacaatcgcccaacttgttgctaagaaaaacgacaacccattacgtggcgaagcgcacctgacaccgttgcaaaacattcgcctcggtgaacgggaattgctcatgttgaaacaacaaggttaccgccctgaagatgtgccattgcgtggttcacaggtcttcttactacaaaattccaacgtctcaaatggtggtgattcggttgacgtgaccgatgagatggatcaaagttactttgcgattgctgaacaggttgctgaaattttgaacctcaatatcacgggaatcgatatcattgtgccaaacttataccaaccatatgatccgcaacaccctgagatggcggttgtgctagaagcaaactacaatccagcgatgttgatgcacttgttcccaatgatgggtcaagcgcggcgcgtttcaatgactgtcttacaattacttttcccagaattagcgattgaaaccgactaaagtaatgcaaaaaggcccgcacaagttaaactgtgcgggcctttttagtgttaatcgaaaagatgttttaagaaaccaccttttttggtgggtgcatcttgcgttgtggtttttggatcagggtatagtgtatcgagcgtaattgcctcatggttaatcgcgtctttggcaaccactaacaaaccgaaggccgttggttcggttttggctgtttcgttgttaacgagcgtgaacggaatcccgtgtgctgaaagggccactaaataatcggtagcagcgggattcttgccgtttaataagacggaatagggcttataatccgtaagatgcgcttcgaatttagcttgcgcagtggcgagttcctggttagtaatgcctaagaagacgcgttcacgtaatgagccgaggtagcggcggcgttcatcgggattggtttgtggtgcgccgtgcatggcactatccaagtgttgttgtaattgatcattatctgacaaaatagtcgcctcatttctgaattgtgctatattagaattaaacctaagtataccatgttggaggaaaaagatgtttacacgtgctgattttgatatttttgatgaccaaaccttaaagggccggttagacaagatttatacgcaacttgatccaaagtttgaagtatttggtgtgcaattgcaagcagaactcgtagtagaaacaaaacgcgaattctcgttgcatattgccaagcatttacgccgcttcaaaaatccaccaatgaatacttggatggcacttagtgagagctcacgcgggtataagatgatgccgcactttgaagtcggtttttgggatgatcggatcttcgtttggtttgctttaatggctgagatgccagataagacggattacgcaccgttattggcaagccaaacagaaagcctcttaagggactttgccgactatgatttaagctacgatcacatgaccaagcaaaaattcccaatgtcatcggagaacttgaaactgattcaagataagtttgctaagaccaaaaaaggggagtggctcctcggaaaagtttatctgaaagacaacccattattcgaccaacccgaagctctcatggccgatattcaaacgaccttgatgaagatggtgcctttatatgagttggtacagactaaatagattaaatcagacgcgtgtgctaagtaggcacgcgtctttaaatgcgcaaaaaaagagccagacctaagtctgactcttttaattgaacagataactgcttatctgttgtagaattcaacgattaaggcttcgtcgatttctggttctaattctgaacgttctggtaaacgaacaagtgaacctttcattgtgtcagcatcaaagctaacgaatgaagggcgaccaactgtgccttcgattgcatccttaacgattacaaggttcttagatttttcacggattgaaatttcttgaccaggttttacttcgtatgaaggaatatcaacacgtttgccatcgacagttacgtgaccatggtttactaattgacgagcttgtgcacgagtgcttgctaaacctaaacgataaacaatgttgtctaaacgttgttctagcaagatcatcaagttaacaccatgcttgccttcgcggattttaccagcgcgagcaaataagttccggaattggcgttctgttaaaccatacattaaacgaagtttttgtttttcgctcaattgcataccatattctgaaatcttaccgcgacggtcgttaccgtgttggcctggagcgtaagggcgacgagcaagttctttacctgtgcctgatagtgaaattcctaaacgacgtgaaagtttccactttggacctgtataacgtgacataaaaaaatcctccaataaatgttttggagtaaaataatccgatgtaaacttagtaatcgttcagttcacttattaacaatcttcacctttgcagccgcaaggttacacaattgaaccaaaactctgggcaaatgaactgttgacggctttaccgtttactgctgcattattttacacaatggctagtatagcgtacggtgtgcggcaacgtcaagcaaattcagattaaaattgcagcttttctaaagtttatcgctaattattgctgaaccgttatcttattcatgctataatcaaacatagtttaatgaattgaagtggatgaacggactaacaaatctgatttaaattgtaaaagggtgtgtctttgaatgttttacattctcattggaatcgtagtcgtcgcactgattggctacctaagtgttgttttttatcaacgttattttatcaaacaaattaaacaactagaagcacataaaggcgacttaatggcgttgccgattccggaacgcttaacgaagttacggtcgttacatttgacgggcgaaagtttgcaaaactttgatcgttgggaaaaacaatatgagcagattaccaaccataacttcagcacgattgaaggctatctttttgatgcggaaacggccaatgccaaataccaattcattcaggttgcacggattctcaaacaattgcgggcgtacttgactgaaacggatcaagatttactggatgttcaagatgctttagaaaatctacttgccaatgaagccgatacacgtcaaaaaattcagcgtctacgagaacaatatcaacaactacgtaaacgtttgttgactaagagtttttcgtttggacctgcattagatgcgcttgaagcaacgctaggtcgcttagaggtggattttgacgaagccaacgaactaacaacagccggcgaccatctaggggctaaggccattttgcagaaattaattactgaaacaacgcaattagaagaccagatggaacggattccaaagcgctataacgaattagctaacgagtttcccgaacaactggttgaaattaatgatacctaccatcaaatgttaaaagaacattatcaatttgatgatcggcagattgaagtcaaacaacaacaactaatggatcaacttgataagagcactaccttgttaagtgatttggccattgagtcggttgaagccaataacgatgaaattgcacgtggcattgatcaattatatgatcaattagaagctgagatgactgccaagaaggcagtcgcgacgcaattgccaaccaccgcgacattcgtgcaacatgctgaacgtcagaaccatgagctattattggaactcgatcatctcaatcagagttatgcactcacacatggtgagttggcaagcgccaaacaattacaaaagcaaattggtgaagaacaggcgttagttgaagggcaccaagcgaagattgccaaccacgaagcggtttacacggcgattgctgaagatttgaccgggattgacgaacggctaactgtcatcgaagaaaaacaacaagcaattcatgatcaggttgctagtttgcatcaaggcgaagtcgtcgctaatgaaaacttacgccagtttgaacttgaactacgtaacttgaagcgcgctgttgaaaaggttaatttacctggtttacaacagaaatatttggatttcttcttcgttgtttctgatgagattcaaaaacttgatcatgatttgaatcaaattaagattaatttagacgatatcgcgaagcaattaattctcgttcaagaggatttagatgaattgaaggccaagacggataccttaattgacagtgcattgattacggagcaattgttacaatatgccaaccgatatcgtgcagattttcccgccatccaggaagcctgtgtgacggtccaaactatttttaatgaagaatacgactatgctaaagctgtcgacttattggcaacggcccttgaaaaggttgatccaggtgcttacacacaagttgaaaaggcctattacgaccaaaagtcagacgcaactaattagtcacttagatgctcaccagtccgagacaagacgcattttgtctcggatttgttttgttaaagattaattggttgtctttaataaccaatttgctataatgtacaacgttaaaacactaatttttagtaagaaggatcgatatgatttattttgacaatagtgccaccactaaaatcgcgccaggcgcacttcagacctatcaagcggttagtgaacagttcttcggcaacccctctagtttacatgtgattggggaaaaagcctttcatattttagaacaatcacgccaacaaatcgctgatttattaggcgtagaccacgatgaaatcttctttaccagcggtggaacagaaggcgataactgggtcttaaaaggcacggcaattgaaaaacgggcgtttgggaaacatttaattacgacatcggttgaacatccagccatcattaaatccatgcagcaactggaaaaattaggctttgatgtgacttatctacccgttgatcagtttggtcgaattgatccggctgacttaaaagcagcattgcggcctgataccattttagtttcgatcatggccattaataacgaaatcggaacgtgtcagccacttgaagccattgctgatattttgaaggattatcctaatattcatttccacgttgatgccgttcaagggattggcaaaggcattcaagaggcgattttcaacgaacgcgttgattttgtgaccttatcagggcataaattccacggcccacgggggactgggattttgtataagaaacgcgggcgtcatttagcgccgcttttaaccggtgggggccaagagcatgatttacgttctggaaccgaaaatgtgccagccatcgcggcaatggccaaagccttacgtttgttattgaccgatgagactgaaaaagtacaccgccaagcagctattcgagaacgactctttaaccatatcagtcaatcggataaaacggttatgttttcacaactgacgcctgattttgcgccgcatattttgtgcttcgcaattaaaggtgttcgcggtgaaacaacggttcatgcgtttgaagaacacgaaatctatatttcaacgacaagtgcttgctcttcgaagaaagggactgaatctagtaccttaaaggcaatgcacgtcaatgaaaaaattgcgacaagcgccattcgggtatccctcgatgaatacaatacgctagaagaagcggatgcattcatcaaagcgttcgatcaaattaacgaacgcttcaaaaaaattaattcgtaaactaccatctaaaaggagataggcatgcaatacactgaaattatggttcgctacggcgaactttcgacaaagggtaaaaaccggaacgattttatcggtcggttaaacgggaacgtcacaaaggcgcttcacgagtataaacaactccggattcaccctaaacgtgaccggatgcatatcgttttaaacggcgacgatgcagaaggcgttatcgaacgtctccgtcacgtcttcggcatccaaaacttctcaccaagtatccaagttgatcgtgatttagattctgttaaagaaatggcgcttgccatgatgaaagaaatcggcaaacctgggatgtctttcaaagttaacacacgtcgttctgatcacaatttcttcttggatacgaatgatatgaaccgcgaattaggtggttacttatcagatgaattacctgaattagaagtgcaaatgaaaaaacctgacattactttgcgggttgaaattcgccaagatgcgatttacttaaccaaccaagtgattcaaggggctggtggcttaccagtcggttctgccggtaaaggaatgttgatgttatctggtgggattgattcaccagtagcaggttacttaacgctcaaacggggtgtcgacattgaaatggtgcatttctttagcccaccatacacaagcgacaatgccttgaataaggccaaagaattaacggcgaaattggtgccatacgttggtgggattaagtttatcgaagtcccattcacggaaattcaagaagaagtgaagcattctgtgccagaaggttacttaatgaccattcaacggcggatgatgttgcgtttaacggatcaaatccgtgctaagcgccaaggtttagccatttttaatggggaatctgtcggtcaagtggcctcacaaacacttgaaagtatgatggctatcaatgatgtcacaacaacgccaatcgtgcggccagttgcgacaatggataagaatgaaatcattgaaattgcgaaggatattgatacgtacgaattatcaatcatgccattcgaagattgctgtaccatttttgcaccaccagcaccgaagacccggcctaacttagataagacccggttctacgaacaacgcatcgatgtggatgccttgattgaacgctcacttgctggaattaaagtgacagaaatcaaagctggcgatcaattcttaaatcaagacgaagaaatcattgctgaactattgtaaacataatgtcaatcaaacttgtcgctgtcgatatggacggtaccctattaaatgaaaataacatccttagccctaaaacaatcaaagttgtcaaagctgctaaaaaacatgacgttaaagttgtgctatgtactgggcgaccactcaccggggtcacgccttttctaaaagaactgggtttaactgaagccactgactatgtgattacgttcaacggtgctttggttcaaaatacggcaactggtgaaattctagtgcgtcacactcttgcgcatgaccaatatcttgaacttgaaaccctctcccgccaaatcggttctcatttacacgctgaagacgatcaattcatctacaccgccaatcgcgatatcagtccttatacagtcggtgaaagtgccctcgtcaacatgcctgttcgtttccgccatgtcgatgaaatcgcacctaacaaggccttttcaaaagtgatgttaatcgacgaacccgccgtcttagctgaagccaaaaccaagattcctgctgattttttcgatcgttatcaatttgttcaaagtgaagcctacttcctcgaagtactcaacaagaacgccggtaaaggaaatggtttgcgtgatttagcaaatgccttaaatattgatcaatctgaagtgatggccattggtgatcaaggtaacgatttatcgatgctagaatacgccggcttcccagttgccatggataatgccattcctgaattgaaaaaaattgctaaggttgttactaagagtaaccatgaaggccaagatggcgtggcatacgccattgaaacatacgcctttgaaagccaagcctaatcataaggggagttattatgactacgttaattgatctcgtttacgcgtccccccttttctttttgattttatttattggtttacagcgatttgaaaaacgccgattaatcaacggcattgtgtttaactttttcctcttcagcgcattaatggatgctgcgctcattgtgattcgcctcaataacgaaacgctgaataacattgcaattgctgctgccattgttgtcgttctaatcgtcatgttcttctacttattcggtattgtcttgttgctgtggaacgcgtatattgtctggaaaaaagaaagtcacacgttatccaacatgctgaccctcctcattgcgttagccatcattggctcatttttcatcccaatcatcacgcgcttgttacacattcccgccgatattaaattatttgtcagcataattgtatcggtttttcttttgtatattccattgttcttctatttatatctaacctcactgattatctatcaattcaaccgcccccgttatcaacaagattacatcatcgtcttgggtagcggtttaatcgatggtcaattcgtcccaccgttactggccagtcggattaatcgcgccattcgattttatgataaacaagtcaaaaaaggccgccctgcaccaaaactggtcttttctggcggccaaggtccggatgagaagctgcctgaatcagttgccatgcaacgttacgccattgagcaagggattccgattaaagacaccctcaccgaggaaaaatcagtcaacactttacaaaacatgcaattttcaaaagacattatcatggctgataccactaaatcgaatcctaaaattatttttgcaaccaataattaccacacattccgcgctgggctttttgcaaagcaagcccgtttgaaagcagatggcattggcgctaaaacatcgcgttacttcttaccaaatgcaatcatccgtgaattcattgcaattctcaaaatgaaacagcatcaattcattttagtcgcaattgcaagtgtcgcatttgcagccttaactgttttactcaatcatatgtaacgtaaaaagccgttgtggacaatttgtccacaacggcttttttatgatgcctatttagcccgtgctgcacggacataatgaataatgagcgtcagtagaataacgccaaacacaattccagcaaacactaggttaggaatttcatagtcaatggctggaatcgacaagaataatttaatcgcgatgaagagaattaagatgtaagccatcggatttaattccggaattttcttcatcaattgggcgatgagttgggcaatcccccgcatgcagataatcccaatcattcccccaattaaaacaatcaccggattactagaaatcgctaaagacgctaatacggaatcaattgaaaaaacaatgtccatcaattcaatcgaagcaactgtgcgccagaaccgatgcggactactgattttagaacccgcctccggtgttttagcctgcttcggatgcccactctttctgaaataagcaatgactaagtaaattaaatacaatgaaccggcaactttaatttcccacaaatgaattaaataggtgccgacaccaataataatgaagcggaaaacataagcgccccataagccatacaccaatgacttttcttgctcaatttttgtaggtaatgtttgtgtctgtgccgctaatacaacagcattgtctactgagagtaagcattccataatcactaacgttaaaattaaaagccaatcttcggacgacgtaatgacagtttgccaattactcagttcaaagaatggttgatacaattgtacaatccaattcatctaaggttcctctatctctaatttctgttatttaattcctgtgactatcttaacgatttttcatgaaaataacaaatttattggttaattatgtaactagcacagcatttttattttataggctctggaaatacggtatactttttatagtaataattaataatattaatggaggtcgttttcatgattaaagaatttaaagaatttattatgcgtggtaatgtgctagatatggctgtcggggttattttgggggctgctttaaaaagcatcgtggactcattaacaaagaacttaatcaatccaatcatttcattattcgttggacaagttgatctatccggtattgcgcttaccattccaggcaccaaggccgtttttaaaatcgggaacttcctaaacgatgtgattaacttcttaatcatcgcatttgttgtcttcttaatcgtcaaaggattcaacaagcttcgtgacatgggcaagaagaccgaagaagaagaagcacaagtagtcgaaacgaaagaagaagtttacttaaaagaaattcgcgatttattagctaacaaagaaaaataaagtcacaaaaaaacgcctgaacaaattgttcaggcgtttttaattgttagcttattgaaatgtgcttccccaaagctaacccgttcaagttagcacgcttatcttttaaatctgttttcaaataatggactgactggtttgttttcatggattcgtttgatggcgtccccaataagtggcccgacagaaacttgtaccattttatcgattaatttttcttttggaagattaattgaatctgtaacaatcatttgcttaatcactgaatcttcgattcgttgaatagctgggccagacaataccggatgtgtacaacatgcgaatacttctgttgcaccagcatctttcaatgcttgcgcagctaacgtaattgtgccggcagtatcaatcatatcatcaatgatgattgcgcgtttaccgttaacattcccgataatattcatcacttcagaaacattcggtcttgggcgacgtttgtcgataattgcgattggtgtctttaagaaatcagctaatttacgagcacgtgtaaccccaccgtgatcgggtgaaacaacaacagcattttcagccaagtcattgctcaagaaataatcagccaataaaggagcacccatcaagtgatccactggaatatcgaagaacccttggatttgtacggcatgtaagtctaatgctaaaattcggttagcccctaccatcgttaacatattagccactaatttagcggtaatcggttcacgtgagcgagccttacgatcttgacgtgcgtaaccataataaggtaacacaacattgattgttttagcagatgcacgacgcaatgcatcaatcataatcatgatttccatcaagttatcattaactggtgcagatgttgattgaataatgaaaatttcgtcgccacgaatactttcttcaatattaatctggatttcaccatcactaaaacgtttaacagaagattttcctaaaggaaccccaacttcagccgcgattttctcagctaagggcttattagagttcaaagcaaagattttcaacttagggtcgaaatattgttcagacatgtcagcctccaaaaaatttatgttagtacctatttaaagtttaggcattttcaccccggaaatcaagattaaaacttaaaaagttcacaaatgttgtaaagtaagcgctgttcattagaaacgtgagagaaaaagaaaaagttaatagcgattaccatcgaacctcccgtttagtatcccattatatccccaaaaatgcttgtttattttggattatggattaaattgtcatttagcgcaagacaaggtacactcattgaaaaaggcggttactatgacccgccttaaatacactatttttaataatctctatcttttaattctggtaattattattacttccgatcgcttatttcacctcagcatgccctattttattcttggtcttattctattcgttgccgttttgatttatcagtatcattttttctaccccagtcacccgaactacaatcctaaaaattatcgcattacaaaaatgggctgggcaaccaccgctgttgggtgtcttatcatacttcttctaatcttattttcaagtggttcaatttggatttggcccgcttttctaatcgccttcttaatacgcgattatttctcaactttaaaataactacaaatatcaaaaaaatcgtccgtaatctcaaaaataagattacggacgatttttattttaagatgtgctttacaacactaagctaatcatcataaacacactttaatccaaaacgtgcttcttgtcaccgtaatttccgcttaatctaacatcgtattaatgctcaattactaaccgcgacagccagcactctattgccattcttcgtcatttgctactggtagttttgcccagtagttttctttgtttgtttgacgggcacgggcgatggccattgccttttctgggacatcatccgtgatggttgagccagctgcaatgaaggtgtgatctgcaatttcaaccggtgcgacaatgtttgagttgctaccgatgaagacatggctgccaacatttgcgtggtgtttagccacgccatcatagttaacaaagactacgccacagccgacattaatatcagtgcctaatgtggcatcgccaacataacttaaatggccaatcttcgtgcgatcgccaattttagcattcttcacttcacagaagttcccaacatggacgtcttcgccaatttcagcgtttgggcgtaaatgactgttaggcccaatgtttgaccccgtgtgcatgatagctgattcaatcgttgaacttgtgatttgaatgttgtcttcaattgttgaatcaataatagttgagccagcaccaacgaaacaatctgaaccaattgttgtgttcccttttaagacgacgttaggttcaacaattgtatcattaccaatctgaacgcccacttcgatataagtattttttggatcaattaatgtcacaccattacgcatgtgttctgtattgatgcgtttacgcatcacttttgttgctgcagcaagagcaactcgatcattaacacccattgattcttcaaagtttggcattctgtaagcagcgacaatttcgccttttttcttcaagatttcaaccacatccgttaagtagtattcaccttgtgcgttctcattcgtcacttcgtgcaaagcttggaataaggtcttgttgtcaaagcaataaacgcccgtattaatttcattaacagccgcttctttatcattagtatctttttgttcaacgattttttcgacaatcccgatatcattccggataatccggccgtaacctgttgggtctggggccgttgctgttaaaatcgttgcctttgcgcctttatcatggtggtatgcaaataatttttcaaaggtttcagcggttaaaagtggcgtatcgccactgaccacaatcgtaatgccatcttcatctttcagtaaagcttcagcttgtaaaaccgcatggccagtccctaattgttcagcttgtaatgcatattgtgaccggtcgccgagataatctttcaccttttcagcgccgtgcccaacaattgtgaccacattggttgggtgcgttctttcaacttgggttaaaacatgatctaccattggtcgaccacaaacctcatgtaatactttatataattttgacttcatgcgagtacctttacccgctgctaaaataattgcatttttattaaccatcataagctcctcgtcattcgtgattactggtctattttagcttaaatactaggctagagcaagctaatccgtattgaagtttagcgctttatcccgtatactggaggtactttattgcggaaggaagtcggccatgccaaaactgacaaacaacattcgattaatgctcggcagcatcattgttgccattgccttactagttggtgggtattggtctacctcagctcggcatcaaacacaccaagccgcagtcacgtcctctaccaaatcacaatcgcatgcgaggcaacaatcgataaaatcaaaaaaagcggctcacccgacaccaattgactggcgtgcgccttccgaaaacaaaccatatcctaatttagacgaacaacccgatttatgggtcgacgtttcaattgcacagcaacgtgtctaccttaaaaatggcaatgatcttttgtacacaatgcatgcttcgaccggttcccctgagtcacccacaccaactggtaccttctatatcgaagctgaacacggcgactcatttttcaatgcaaattccggggaaggtgccaaatattggcgctctttcctagatcatggtatttatctttttcacagtgtgcccacagatgaagctggcaatttcattccagaagaagcagagcaattaggcaaaaaagctaattcacacggctgtatccgtttatcagtagctgatgcccaatggttctataccgcaattccatataatacaaaagtcgtcattcactagcttgaatgacgactttttacttaataacgttcaaaaggagatgccctgatgactcagacaacccaaaaaacgattgccacggcttttaaacaattaatggttgaacaaccttttaataaaactagcgtcaccaccatcatgaataaaactggcattcgacgccaaaccttttatgactatttccctgataaatatgcgttattagattggatttacgatcaagaaatcggtgtctacatcgacgagcatctcagctatatccattggacacaggtgttggcgcaactatttaactacttcgatgctaaccgcgccttctatcaaaatgctttgtcgattgaagggcaaaacgccttcgaacgccattttattcatcacgtccaccaactgattaatcggattattcaagatcttgctagcgcccatcacattacgttatccaccgactaccaagcctttttacttagttttctttccaacgcattagttgcttacaccgctgaatggctccgcagtcgtcatccccaatcagtttcaaaagtaatcactgccctaaaaatgacattaactgatacaattaacggtttattattacggacaggacacttatatgaacaacggtaattataagataatcccatcaaaatttaatttcatatttattgaccattcttagcgtagttggcttccacgactgctttttctgcttgccaccagtcttcattatcacgataccagtcgatggtatgttgtaagcctgatttaaaatcagtgaattctggttgccagcctaattcttcccgtaacttcgttgaatcaatggcatagcgtaagtcatgacccggacggtctttaacttgatcataagcatctttgggttgccccattaattctaagattaattccaaaacatttttgttattttgttcgccatcggcaccgattaaataagtttcaccgattttacctttagttaagatggcccaaacagcgcttgagtggtcattcgtatgaatccaatcacgcacgttttgacctgaaccataaagcttaggacgaatgccacttaatacattagtaatttgacggggaataaatttttcgatgtgttggtatggaccgtagttgtttgaacagtttgaaatagtggcttgtagcccgaatgaacggacccaggcacgcactaataaatctgaactcgcttttgatgatgagtaagggctacttgggttataacgtgtttcaggtgtgaatttttcaccagcaccttcaccatgacctggtaagtcttcgcgcaatggtaaatcaccataaacttcatcagttgaaacgtggtggtaacgcacgttgtatttacgacaagcttcaatcaacgtatatgaaccgatgatgttcgtttgaatgaaaggtgatggatcttttaaagagttatcattatgactttctgcagcatagtgcacagccgcgtccgtcttttgaactaacttatcgactaattcagcgtcacagatgtcgccaaccactaattccacacggtctgctggtaaaccggctaagttagcgcgattgccagcgtaagttaatttatctaaaaccatcacgtgaacttctggatggttattcaccacataatgcacgaagttagaaccgataaagccggccccaccagtaacaataatatttttcaacctgaatcctcctaataatatgttaatcatagtattcattcttaatttatttaaatataacagcaatatctatttaatacatagcttaccgtattttaaaatcgcattaccgtcctcaacaatattttaaagttattactagttacattattaaaaatcatcttttcttttgaatattattctatataaaaaactgcttaaactcagtctccaaaacagacatcattttaagcagtttttacttcttatttaatcttcaacggtgctaattgggcttcaattgcagctaaatccgtccctgcttgcaacaatgccgctgccgtatagcaaccttcgattaaagcaacatcgtatagatgcaccgttttatccgttagttcttgggccaattcgaggttcatcttagcgctccctaagtcgtagaaggctaacaattcttgcccggcattggcttcaaaagcactttgaatcttcattgcgctagtcccaataccaccttcgtccgtgccaccagcagtcgttactgaaacatcagcggcaacttctttaattaaacgcgctacaccggccgcaatttctggtacgtgagaaacaatcacaacaccatattcactcatgataatacccccgccattaacattgtagtaaataaatacccactagaagccgcccctggatcaacatgtccgattgagcgttcaccgacataagatgcccgacctttggttgcttgcatatctttggtcgattcgacggcagcttcaattgcagccacatctaaagtaccatcttcaaccgctttgacaacgggagcccaaacgtcaatcaacgtcttttcaccaacttgtgcatgcccgcgtttttgaattccttctaaaccggctgccaataatgggccgacttcaagtgtcgtactgcttagttttgccatttctaaaaaggctgtcccatagagtggaccagaagccccaccaactttgctgatgagcatcatcgcagtcgttttcaaaataccttgtacatcggttggctgttgcttggtcaatgcttcatgcacagctaacaagccccgcgacatgttattaccgtgatcaccatcaccaatcggtgtatcaagttcacttagataatctttttcagcttgaatttttgcatcaaacaattcaagccatttcaatgtattttcaactgttaacatggtatctctcctttaccaaccaatcgttgtgactggttcatctaatttagcaacccaaccaggttcaattaatttcataattgttaatgacacaccggccatatctaaagaggtcatataattgccgacttttgtgaagtcgacttcaacattttcagcggccaagaggtccaagacatcattcataaagacgtattgttccatcagtggtgttgcacctaagccatttaccattaccgcaaaatgttcgccggccgtcatgtggtgggcttcttttaacttgccgactaattcagttgctaggtgtttcgaatcttgtaatttttcacggcgataacctggttcaccgtgaatccctacaccatattcaatctcatcaggcgctaattcaaaccccggttttccgacctcaggaacggttgcgccagataaggcgaccccgattgtcttaatattcggtgtaatttggtgcgctaattcttcaattgcttcgataccagcaccttgacgggcataagcacccagaatcttgtggacgaagattgtccccgcaacaccacggcgtccttgcgtatacgtactattttcaacagcaatgtcgtcatcaacaacgattgagcgaacgtcaatatcatccatagccgccatatccttcgccatttcaaaattcatcacatcgcctgaataattcttaatgactaagaacacaccacggcccgcgtcagctgctttaattgcttcataaatttgatcaggtgttggtgatgtaaagacttgtccgcacacagcggccgtcaacatgccatcgccgacaaaaccagcgtgcgttggttcatgaccactaccgcccccactgacaatcccgacttgtggccgatgttttaaatcggcgattttcatcactgcttctgttcctggaatttgtttgagttggtctggataactccgcactaaaccttggaccatctccgttacaatttggcttggatcattcattatttttttcatagtaacctcctcttaaatataacttcagtctatgttaccgctgtcatttatgcaacggacaaagcttggaaactgtccgaaagcacttcaaataaaaaaagcacccgcacaattaacctgtccgggtgctatcaaatcgtttaagctaagcgatctgcattctttgttaagtaattaccataactgacacttaacgttttattttcaatatcaactttatcaaccttcaagattgatgtgtaatcatcaaccatccgattgccttcgaaatctgattcagcaaagacagaaatgccaaccatttcagaatcaaactcttcaatcaagctcttcatcccattgacggtgccgccgcctttcatgaaatcatcgacaattaagactttggaattttcaggtaagctgcgctttgaaagttccatcttttcgatgcgagctgatgaaccagaaacatagttcacactgaccgttgaaccttcagtaatttttgaatcacggcgcacaattacaaatggcacatttaagtacatcgcaacgctctgtgcgattggaattccctttgttgcaacggtcataacagccgtcacttctttacccacatattggttggcgattaaacgcccaacttgccgtaatacttctggacgtccaagtaagtctgataaatagacgtaaccaccaggtaataagcgatcattttctgaaagccgttgtgccatctcagcgataaaagcttctgcttcatcttgtttaatcattggcatgtagcgcacaccaccagcagcgcccggaaccgtttctaagatccctgtgccacgattaaaaaaggtccgcttcacaattgataaatcttcactgattgatgacttagctgattcgtaacggtttgaaaagaatgtcaatggaatcaacgtatgtggtctttctaataaatagcgtgtcatatcgattaatcgatcgcttcttctaactttcatgttgaatacccctctatatattactttactgttatttccgaaaaaaactgtctaccaatcaattatatagaaatcttcggttaaatcctagtcttttttaaaaaaagagcttaattgttcgcttttatcccattaaagcgattcctacgccaattaaaaacgcctcaaccatttgattgtcggcgttttattatggtttcaatggtttaaccagatatacctcagcgcaaaatccggacatactattataaatccgttgagcccgtgaatactgactacagataccaaataccgttggaccactaccactcatctgagcaacatccgcaccaaactgcaataaccgctcacttaattgcttgataactggataacgttcagtcgtaatcggtgctaaaacattccccatattgcgagtcattgcatttaaatctccagcttcaacggctgcaaccagcgcctcagtttgtggatgctgttgaatctggtcgcaatccaatgcacgaataatccgcggcgtcgaaacactgacttccggtttcacgacaacgacccaaaaattcggtaatgacccgagtggtttgatctgatcgcctttgccagtgacaagggcggtttctccatatacgcaatatggcacatccgaatcaatttgtagccctaatcgcgccaattgttcgcgcgttaaaccaagttgccatagttcgtttaacccccgtaaaacagcggctgcatcagaacttccgccgcctaagccagccgcaactggaatatgcttatcaatttcaattaaagcaccggttggaatctgataggtgtgttgtaataattgagctgctttgtaggccaggttacgctgatcttctggcaaaaagccacttgatgtgcggacctcaattgcgggatcatcgcgtaatgttatctgaacatagtctgccaaatcaatcgacgtcatcaccatctgccactcaggttccccatcgtcatgtagaaagagtgcatctaaactgagattgattttagcaggtgctttttcaattcgttgcatcacattcaccttttacctagcatttaattgtttcattatactcatatctgcttgtaaaaaccaaccttttaacaatgcatccaaaaaagcactgacaatcatctgtcagtgctcttcagtcgacattattgattatcttttaccataatcttatgtctaaattcattcattaaatcaagcatctgcttggcattttccttaccaaacgtctccatccacgaggcaaaccgattatggatcttcggatttaattcttcaactgttttttgaccagacggcgttaaatttaaaatcaaccggcgccgatcatcgggatcaatttcttgtgtaatatagtctaatttaagtaaaacacgaatctgtcgagaaattgcaccgcgtgttacgcctcgttttttagcaatatcaattagactcactgaattatcatcagcaatctctttcataatcagatattgttcaaaagacaattggtaagcttgcgttggttcagaaaccaagtcttcgacatatttaatcgccgacatgtaaagttcaacgtattcatccaacaattgactatctttcacaatatttcccacctttttatttattttcttaactgtaccacaaatctttaagcttgactatttggtgtttgcgttaacttttgttttaactctccgccgaacaaaccggcgaagaacactgcacaaaagatcaccaagacgattaagactaaccaaagttgtgaaccattgccgttgacaacttgttcgaacccactaatcgtgtaagtccctggcaagaagattgccacaccacgatagaagcctgaaagcatgtcattcgggaagagtccccctgtaatgatgagttgtaagaacaataacccgaaggccattaaaattcccatcgttccaaaaagtttatccaatgctaaacatgcaagggtaaagaccgcactcgtcatcatacttaagacgaagaatgcgaacggttgtgcaatcgtcaatccaaaaaggtttgcaaagatatcaattaataaggcttgtgcgacaactacgccagctacaaccaacatccgttgcttaagtccactatgtgctaatgtttcaccatagcgataaagtgttaattgcgtcaacattgccccaacaaagaagacaagtgttaagactaatggcgagaaggtattaattaatgcgccatgatttgtatctgatagtaattgatctttgactggttgcacgaaatgttctacatttgcggaacctgttgaaagattggcaacttgcttgctaccatcgattaacttgacgtttaataagctaatcccagcacccgcttggcctaagccagtcgttaattgtccagcaccatctgccaataagcctgaaccctcgttaatttgtgtaatgccagaaacaagcgttggtgctttttggtttaattcttgtagaccatttgctaattgatggctaccattgttgagctgttggacgccactgccaagttgactttgtagtgtttgcaatccattattcaattgttggccaccatcattgagttgttgcacaccacttgccaaagctggtgtttgcccatttaatgtttgtagaccagcttttaattgttgaccaccattgttaagttgattgttattagcaactaattgattgctccccgtagctgcggttgaaacgccattcagataagttgtcaagcccggcatcaatccaggttgtcctaccttaccttttaatccttcctggatttgaactaatccatcatgaatcatgtcagcggcttgaatcccgcccattgtatcaactgtattgcctttttgtttcaagccagtatcgactttggctaaccccgctgtcagtgtatcaatcgcctgtgtggcaccatttagcgctaatggcgcttgatctttgcttgccatcttcgcaatgccagcttttaattgggccatattatcagcagtcttcgttaattcatcggatactgcttgtaattgaacacccgtatcactcatattattgcccatcgtgcctaagttggcttgaatggcttgcatgttctttcctgaagattctaattggctaccagcattgagtaagtcttttttagctgcaccgccaatcattattactctcaacgcgatagaagggttatcagccaagaatgttttaaatgtcggattgttttcggctagatcgtttaacttctgtaattgtgcaccagcatcttgtaagctgctcgcgacactatctgttttatcggtattgtatactttatcgttaatttgacttaaattagacccactatcttgtaaaagggcacccgtatttttcgtattatccgcaatcttcaataagtctgctttgataatttcggaattatcattattggaatggttaactttttgatctaactcttgaataccagcatttaaagcgcctaacccagccttcaattgtgttaattgttctttattaccatcaagactcgcttcgatttcatcagctgccgcggtcaacttttcgctcaactgcttggtgccatcagttaattggtcgacaccgccattgatttgttgcccaccagctaaaattgtttggttattggctgctaattggtttaaaccagcattaatttgaccagcgctagctgtataatctccaagcccagttgaaagttgcccagcaccagttgttaattgttggaccccactttgaagtggtgctgttttaccagctaattgttgtaagccacctgaaagttgtcctgaaccagtaacaagttgttggacaccagatcccgttttgtcagataattgttgtaagccatctgaaagctgacccgatccagttgttaattgttgcacgccacttgccaatggcgcactaccatctgccaattgttgtgtcccactatgcaacacatttaaattatcatagatttgttggctcccatttgataattgaccggctgctgtgtttaactttttaacgccattgctagcttcttgtacgccactgcctagcgtgccgattgcaccaagcaaggcttgattataagcttcttgaattttttgaacgacactgcccttcatttggttcacgacttgggttgtaatcatgccggccatgtagttatttttcttagacgtttcaacttttaacaagctgactttaggtgacttatctaacgcggttgtcgcatttttagaaaagtctttcggtaagacaacctgcatcgcgtatcggccgctagctaagttcgcttttgcatccttagcactgacaaattgccaatcaacctggtgatcattacgcaacgtttttagtacctgttgcccaactgccaccttttcccctttaaatgttgcggattgatcttgattcacaaccgcgactttcatatgtttaatattagtggtctgttcgtacttaataaaattaaatgtgattagtaatagtaaaatcggaattaagcagatcataataatgaacccacctaacttcactttgttctctttccaattgccaaacatattctttctccctttttgtatacgtcataatcattctatatgatattgttttatcaaacgaatgtcaacaactaatcaaccacgtgaagtatatggcgattcgtcaatctgctttttgaacaaaaaaagcactcaaccagttggttgagtgctactctattcttctattttaaactataggacaattggttcttcatcaaactcaatctcaatcgatttcgttaacaaatcagcatagctgtatgaaacacgttcaaaagcattttcatcctgatctaaatcgactacaaatactgctggaaaggtttctttaagaattccctttcgctttgtaacttttttgcgcccagcttgagcgacaaccattaacttgtctccgatatgcccatcgagaccgttcttaatattggcaagtgtggttggcattatgcttcacctcttcgagggatagtataccatataaacgaaaaatttgcaattataccattgtaccaacgatttggcaattacttacttagcttttttagcaaagattggctgattattcagcgcatcgcttaattgggcaaattgttggatactcaattgttcagcacgagcgctcggtgcaatctcgactgcttctaaggctgttgttaaagctgctttgacttcatcttgtttaccaaattgattttgcaagttattccataatgtctttcggcgttgtgcaaatgcgccacgaaccaattgatcaaataaggtttgattagcaactgttacaagcggtgctttgcgccccactaattcaacaatcgctgaatcaacattcggttgtggcataaaagctgtcttgggcacaataaaggctaagttcacttctgaatgaagttgaacggcaatacttaatgagccgtaagcctttgaaccaggttcagcgttgatccgttctgccacttccttttgcatcattaagaccatgcgatcaattggcaatcctgcttcaagtaagtgcaacatgattggcgtcgtaatgtaatagggtaagttcgcaacgattttgagattatgcttaccattaaattgttcggcgataatcgtttttaaatccgcttcaagaatatcttggtttaaaatcgtgacgttatggtagtgattcaaagtatcttttaagaccggcattaaccgttcatcaatttcaaaacttaatacttgatgcgcttttctggcaatttgttccgttaaagaaccgatcccggggccgatttcaatcacatcgtcatctttggtgatatcaccagcttcaacaatttgtttcaaaatggcgatgttggttaagaagttttggcctaagctctttttaaacttaaagccgtaacgtttgagaattttccgggtacgctcgggatttgcaatatcttccatattaatctcctaattcctgtttaatttgtaatagtgcagcgccaaattcagcttgcgtcacttggaacatcttgagacgcttgtaaagttgtttgctgttggtgtaaccaatgtgcaaaatttcgccgagtaattcgcgccgtcgctttgaatcagcccccgcaatcaagcccgccgttaataaatccgattgactgatttgttcgtctgcttcttcatcttgtgttaatagatgctcaagtgcttggacaatcgccgctggttttgcgtgttcaatgcctaaactgccgcctgctttttctggacgtgcttctgtccgtggtaaaaaggcgtgttcgacgcccggtacattttgagagatgattttacgaatcttctcgccatgaaaatcgggatcggtaaagacaatgaccccgcgtttttcttgagcgagcgcaattttttcgataatttcttcattgattgctgaaccgcgcgtttcgattgtcgaaacatctgggaaaacttcccgtaaccgcttcgtatcgtcgcgcccttcaacaacaatcacttcttgaattgtttttttcatagtgctcctaacttaaaaatccggtgggcattcgcatacgtcgctgccgcaatttcttctggtgccacatctctgagtttagcaatcgcttctaccacataccgtgtgtagcctggttgattctgcttaccacgataaggcgtcggcgttaaataaggtgcgtccgtttcaaccaacatcacgtccaatggacatgctttagctgcttcatggacttcatgcgcatttttaaaactgaccacaccgctgaacgaaatctgcatgccaagatccataaaccgtttcatccattcaacatcgccattaaaactgtggataatccccccacaatcacggacatctgtttcttttagaatcttgtacgtatcttctaacgcgtcccgcgtgtgcactgaaattggtatatgcaaggatttagcaatctcgatttgccgtgcaaaaacggtttgttgcacatcgcgtggcgaagtatcccaatgataatccaaaccaatttcacctagcgccactacttctggtcgttgtaattggtcagtcagcacggtttcttctgccttgtgataacctttggctgattcagggtgccaaccgataatggctgataaaggttcatattgcgctgctaagcgcaaagcgccctcatttaatactgtatctgaaccaacaatcgccatttcaacaacaccgagttcagcggcttgcgcgataaaatcagcttcttgccctgcatatggggtatcattcaaatgcgtatgtgaatcaaaaatttgcatttcaatctccttttagtgtcctcattctgacagttaaaacgtgctcttgccagtagctttctgcgctttgttacactttcaaaccggcgattccatcgccaattcgccaagttagacaaatgctcaaaagctaaccactggcaacacactcttttccattaaaaaggctaaaaggcctacagaatgtaaatgccttttagcccttttgacgtttctgttattttaaattaaccgatttgtgagccgttcaccaagttgtttggcacaactgctaattcaacttgtccgtcatgttctgctgataacaacatcccttggctcaattcgccacgcaatttacgtggtttcaagttcgtgacggctaagactttcttaccgactaacgcttcatagtctggatagaattcagcaatgccggaaacgatttggcgatcaccttgatccccagcatctagacggaatttcaatagtttatcagcgccttcaaccttggcaactgccttaatttcagcaacgcgaatttcggtttgatcgaaatcttcaaacttgatggcgtccttttcactgactaatgttgttgcttttggatcgaattcagctttggcttcagctgcttgttgcttagccttcactttttcgttcactaagcccgctttttgcgcttgacccatttgatccttaatatatgcgacttcttcatccaagtctaaacgtgggaagattggggtccctttagcaaccacttgaatattggctgggaatgtcccataaaccaattcacgttgcgcaacttgatcgaaatcaagccctaattgtgcaaacatatcgcgtggtgcatgcgtcatcacaggttgtaataagagcgcaacaatccgtaaactctcagccaagtgggctaagacactatcgagttccgctttgcggctgtcatcttttgccaagacccatggttctgtttcatcgatgtacttattcgcccggctgattaattgccaaacggtatctaaggcatcagagaacttcaattgatccattaagctggtatattgttcgattgtttctgtagctgtcttttgtaagtctgcatcaaatggtgtcacgtcagcttgatacgctggcactgccccattatcatacttgttaatcattgcaacggtccggttcaataagttgcctaaatcgttggcaagatcgtagttaatccggctgacaaagtcttccggtgtaaatgtcccatcattaccaaatggaatcgcgcgcattaaatagtaacgtaaagcatctagaccataacgttccactaacatttcaggataaactacgttgccttttgatttagacattttaccgtctttcatcaacaaccaaccatgaccaaaaatttgttttggtaatggcaagtctagagccatcaagaagattggccaataaatcgtatggaatcgtacgatttctttcccaactagatgcacatcagcaggccagtatttattaaacaattcgtcgttgtctaaaccgtacccaagcgctgtgatatagtttgataacgcatctaaccacacgtaaaccacgtgcttcggattacttgaaacgtgaattccccagtcaaatgagattcgagaaaccgataagtcttccaaaccaggtttgatgaagttattgatcatttcattacgccgtgacgccggttcgatgaaatctgggtgttcttcataataagccaataagcgatcagcatacttgctcatcttaaacttgtaagtttcttcagcgacccgttgaacttcatgaccagatggggctttcccaccgatcacattgccatcgtcgtctttataaacttctgctaattgtgattcagtgaagtattcttcatcagaaacagaataccaaccttcgtatttaccaagatagatatcgccttgcgctaataacttgtcgaagattttttgaaccgctttgacatggtattcatccgttgtccgaataaatttgtcatttgaaatttcaagagtttgccataatgccttgatgtctttagccatgccatcaacatattcttgtggggctaaatgcttttcagctgctttttgttcgagtttcaagccgtgttcgtccgtccccgtcaagaagaagacatcaaagcccatcaagcgtttataacgcgcgatgacatcggcggcgattgttgtatatgagttaccaatcgttaatttaccagatggataatagattggggtcgttacgtaaaatgttggttttgtctctgccattaggttcgctccttaattaaaaaaacgagaatcttaacaattctcgacttgcttaaataatgccatataagtaatcaaagtatagcacaaaagagcagtcatttaaacgacaactcacactaagccttcattaaaataaatcaatctgttcaggcgctttcggggctaaatcaggaaattctagcccaagtaattgttgtaattgcaaagcattatccgcagcatccccaccagaattattgttaaaaatcacggcaacttgttccgcttgatttttaatctgccgcacagcatccgcaaaaaattgtaattcatcttgatcatagcgatacaatgttcgttgcttccgccattgggcacccggattctgccacccggccatattacgaccatgcaggcgcaacatcgcaaacgccggattggtgacaaccggttcaaacggcacactgttcgtcggtgtttgtgcttcgtctgtgatgacgtgtgtcatgtttagctgcttcaaaaaggcgtacatctgttgcttaaaagcgtcatcgtaccaggattgatgccggaattcgacagcaattggcacatccggtaaccacgcgcgaatttgtcgtaaatattgactattttcctgattcagttgaaaaaatggcggaaactgaaataagaccgcctgtaattggccggccttaattagcggttcaattgattggcgataccgcacaaacaattctttttcagtactcgtaaactcggcgtagtcttcttggcgggtcattgcttggtgtgctttaacaatgaactgaaaactggctggtacttgcgtcaaccagtttgcgctgacggttggtgcgcgtaagccgtaataaaaactatcgacctccaccactggcagaaattgcgcgtagtcgtttaatgttaactgctttttgctgggcattaatgactgatgttctgaccaagtagttaatccaattgttatcatatccacacctctagaaccgttggaattgttgaatgaacaaagcttcttgttccgttaaatccttcaatgtgacaattaattgttgtcccatgcgtttataatttaaccgaatccgcgataggctaaagtcgatgactagcagcagcaacattaagctaatggcgcgcccctcagaaaacgccacccctaaaagctgtaccttgcccgttgcagttaagaatttaaaaataatgtataacgagaacagttcttcgacgactctaaaaaaacgaatcccttgcaacttcttctttaaaaccatcaagaccatcatcgtttggtcctttgtcatcatagtgcttcctctccttctcttggttcagtaatgggaattgcttcaaaaaaaatcatctgatctgcatgaaaatccgtgtcataccgattgagctgaccgcttaaaacagttggtaaaatggcctgtaagtctgccacaattccttgattatcagcagcttgtgcccattctggttcaaataattgaagcacgccttcgcgcattccgaccggataaagtggtagttgcaccgttggtaaaatatcgactaaaaaaatgtcaatcggtgcaatcgtttcaccgtcgatgtgccaatcaatccaccccgcattttggagtgtgtattggttggtttgtaaacccgtttcttcaaataactcccgttgcataccactgattggcgtctcatcgggttctgttttgccaccaatgccattccaaagcccagcaaatgggggcttaatccgattcaataatagtaaagtcccgcgatagcgaattaccgctaaattatagcgtcgtttagtcacagttcaatagcctcacatctcataaattagtttcattttagcatattaagcaaaagagtgctgactgtcgcggttagtaattgagcattaattcaaaaatagggattatggcgcccttcagccatgattgccatttttaggttaaccggaaaaggcagttcgaatcggcacgtttcaatcaaaaaagagcgctccgtctccgtttcgctctttccacattatttttcttctgcttctttcatcgccttcatcaattttacttgatattgtttcgaaattaaaattaacgtttggtataaatcccttacgtaatctgcgagtgctggatctttaaccgcagcaaggcgcgcatccatcaccgctttttcgcgttggatgtccgtcaagccgattttttgttcatgcttgattgttgcaatttgcttggtgacttgcatgcgttcttcaaataaaaccgccaattgggcatcaattgcatcaattttttgatagtgttcagttaacatgggctcactccttagttgctagtgcggcaaaaacgggtgtcgcatccgcttgtatcatagtgactggcatttcaaattgtaatgcctcttgattaatcgctactaattgggcatctggacggcgatattcaattaaacttgcaaatgggtacacacgaaatgacgtcccgaccacgacaattaaatccgccgcttcaatcgcctgaatcgaccgttcaatcaccgtcggatcaatcggttcttcatataaaacgatatttggtcgcaaaatcccaccacaatcttgatgatgcatatcctttaaataggcctgataaggcactgcttggccacacttttggcagctgacacggtataaactaccatgaaattcaatcacatcccgcgcgcctgcttttgtgtgcaacccatcaacattttgggtgataatctgccccttttgattcgcaatcgtcgccatcacttggtgaatgacatttgggtttgcttcaggaaaatacatctgctgcgtgacaaattcataaaaactggctggattggtgattaaattcgtgtgacttaataaatattctggattggcttgctgatgatacaaccccgttttcgatcgataatctggaatgccagaagccgttgacacgcccgcacccgtcaagaaaacaacatgctgtgccgcatgcaacattgatttaaaagtcatcaccatcactcctttttaacgtgcttttaattcgcagctttctgcgctttgctacatcagtcggccaatcgcctttggcgcttatccgtctgattaggcaagtgctcaaaagctaaccgcgaattaacgcactctgttctttaacgtgcttttcaagctaactttctgtgcttagcactgtgaatcaaatcatcgactgcgtcgctaattcgcttccctgtgctaatgctcaaaagttgaccagcttgaacgcactcattttcttaatgaatacggcattccaatttcatctaagaaggtttgcactgataaatcatacaatcgtttgaaatattccggtgttgccttgtcttctggaatccctaagacaaaagcattttgttgatcactcttaccaattccaacatacgctttttggttcgttgcggtcgcaaatagattttcggaatgtaaaatatcgtagacttggcgcacttctaatcgtagttgccgttcacttaataccggcgtcaatgtcaagagttgttggaggttcgtttcagcaaatcctagggttgataacacgcgatcaaacgcaacccacaagttaatcacagcccgccgtaatgtgaatggtgaatcaattgttttgcgtgccaacacatgatagagaatttcggcttgggcaaacgcaatcggataatcagccgtccactgttttaacagttgttggttgccaccatcaaagaagacgagggcatctaacagcgttaatacgcggaaaatcacccatctattttcgggatcgtctttttccggggtcagattatctcgtagaccttcaaggtaggcttgtttagtttcaacatccacaaagccatgggattcttgttctttttgaatcaccatgtgcacagcggcattgtacaaagttgtgccggtcgcaaccaattgttcatcgagttgcgcatcctgcgtggtgacatcggtcatgatttgtggaaaaccgattgataataatagtaagtgcaataattcgtgtgataaagcataatcggccgctgtcgcatcggtaattaagattgccaagctgccatcgttatttaaaacgcgttgtgcctgatcatgttttaacatcccagacgctgcatctgcgacccggatcttaatgggttgaggataattcttttgaacctggtcaattaaactttggatttctggggaaaattcagtagttgtcatttttggtctcctttgagtaaacagctttgcttttcatgataagccaaatccagttaaattaccaacggtttagaatgtatgaaagcggttaaaactgttataataaaggtaatcttaatttaaaggacgtgttgactatgacagaaccaaattcgcgaaaagtaattttataccttgctcagagtctagatggcttcatcgctgaaaaagatggtagtactgcttggttagctgcactcgattcatccgaatcagacgctgcaattcaagctttccaacgcaccgtcgataccgttgtgatggggcgtaagacatatgaacaaagtcttaaattagccggcacctatccttaccaagataaaaacggctatgtcttctcgaaaacgttacatgatacagaagatcgaacacatgtcgttgctgggaatattcctgagttcatgcgtcaattaaaaaaagaagatggcggcaatatctggcttgtgggtggtgcagaaatctttaccgaattgcttaaagcccagttagtcgatgaactcatcatcaccattgcgccagttctcctgggtgacggcatttcactggtcagcacgcacttaaccgatatgccattggaacttatcaatagccgtcaaatcggtcattttgttgaattgacatacaagattaattattaaaaatcaaacgaaaaggcagccacaatattttgtcgctgccttttcagattaaagtacgggggaatgaccaatgaaagccaaccttaaaatcccacttattttattcatcgctttatgtatcagcggcctctgccagctgttgcaccaagatttcttcgctgtgcttgtgatgctcatcgcaacaatcagttgtctgataattgcctttaaaaaccggcaagctagcggacgttaattcgcaacgcgctcataatcacgagcgtctgttctgtgctgatggtcgccccacgtaataattcgagcgtgaaagtcgctttttcgaattgattctgactgatatcgagattcttcaaattcgtgccagtcatatccatgccgttcaaacgattcccgatcattgttagccactgccaatcaacttgcccgagtgagacttcttgcatactgcaatctttaaagtcgacatgccgcatccgcgcaaagttaaagccggtgtaatccgcttggcaagtgtcgaacgtgacatcattcagaccagcctctgcaaaatcggaaccaatcaactggcaaccattaaacgcgactcgttggaagggatcattcgtcaacgaacagtttaacaacgcgcagtgttcgaattgcacatcttgaaaatcacagttattaaagtcgacttgttcaaactgacaatttttaaataaacagcctttaaagaataacatctcaacttcggtttgcttcaacgttagttcttcgaaaaacaaaccttcataagtctcatctggttcaaacgcagtaagctgtaccgtctcaagttgtggatttagccgcggtgcctgtgctttcttatctgtcatctaactgtctcctgtctattgtgattagtataccgaaaattgtcgccagtgacgacctgaaattcaggaaagccttttcttttcattaatggtactttgtggtaggttaaaagcatcaaataaaaggagtgattgatagtgcaaaaaatcaatgttggtggcagcggcttaatggcttcgccaattgtctggggtgtcatgcgcatcccacaactgagcgaccaagaagccctgacaatgctcgaaaccgcctatgaacatggaattaattactttgataacgctgatatttacggcgatggtgcttccgaaattaaattcgggaacgcccttaaggccagtcatattgaccgtgatcaagtgctcgttcaaaccaaagtcggcattggcaaaaaaatgtacgacttttcaaaggaacacatcatcgaaggtgttgaagccagcctcaaccgattacaacttgatcatgttgacaccttactgctccaccgacctgatccactcatggaaccggatgaaatcgctgaagccttcttaaaattgcaaaatagtggtaaagtccgccaattcggggtcagcaacttcaatcccggtcaagtcgacttactccaacaagcagtgccgcaagcattgattgctaatcaactccaattcagtttgatgcacactggtatgattgatgccggcgtgcataccaatatgcaagacgcgcgcagcattcatcacgatggtggtttattagaatactcacgcctcacgaatatgaccattcaagcatggagtccttatcaatacggcatgtttgaaggggtcttcatcgataatccgaaatttccagaattaaacgcagcactccaatcagttgccaaggcacatgacaccaacgtcaacgcaattgctagcgcatggctcctcagaattccagccagcatgcaagtcgttgtcggcacaatgaaccccggccgcctagcacaaatctgcgaagcagacaaagtcaccctcaccagaagagaatggtacgacctatacttggcagcaggcaatgacctgccataaagtgctgagatagccgtttatcacttgaagattagcctatcaccaggaattatggtggtttccggccatgatttttgttgtgtagtgaaccggaaggttatggctatcgaagcatgtttaaagtacgtttaaaacggttagtttctaagtaagtagtaattgtgcattaagcaaaaaaagcgccgtctcaattaatcttgagacggcgctttttttggttctacttaattctgataaggattgcctgcatactgatccaccaccgccatcgatccatcgtaatggccgcgaccggttgcatagtcaaattgcatcttaggttgtacattccaaacatacgcattaaagttcaacttcttatctgttgagattgcttgaacccagtaaccgcggggcatcaattcatctccacggaacacagttgtcacttggtaaatcacctttttattttgcgttagtgcttggcgaacctggtcttcaaaaatctgcatggtacgttgattgctgaagaccgtttgtgtcgctaagttcttcggattattgctactgccgagttcccctttttggaaaacaccatctcggttgaaattaaacgaaatcgcgtatgcaatcaaatggccgcgactttcaggaaagacccgttggccatcaatcatcacgggttgattatgccagccggttggttgccacgtttgacgatggcgtgtgtttgaacggcctaacgtctctttcgataagaaagccgtattagtcgttgtccgatttaaaccatccaacgcaccatacttgatccgttcggtttgccattgacggacatccaacgttgatttattatggttcacttctaaataggcattgtcgcctgacttaaaggtcttctcagccaagattgccgttgtttttttaacttgttttttatttgcaattgttggtgcattctcgtgcgttggttgactagattgtgtcgcctgacagccacccaacgccaacatggtcaacgataagccgaccaataaatactttttaaacatcctgttcctccctattcttacctgcttcacgacgcttcagttggtgcattgtcttgaaataggaactcaatagcaccaaacatgaaccaatccaagcgagtgggttggctaaacttgcgcccatgaagccgaattgctgcacgaggaagatcccggcaaaaatccgcatgaacaactccgcaatccccgctaaggttggaataaagctctgccccaaaccttgcaaggtgtagcgaatggcaaataagattgccaaaataaagtaacaactactgttaaagcggaagtagatttgtgctaaatccgtcacgtgcggttgattgttcccgataaacaggttaaccagtggtcgtccaaaggcaatgatcaacgcgcccatcactaaactaaagatgattgacaccattagtgtctggcggacccctttactgattcgtccaaattcacgtgcaccgtaattttgtgcggaatatgtcgccaaggtaatcccaaatgaattcccaacttgagttgctaattgatcaatcttcccagccgctgtgtaagcagcaaccgcgctagcacccaatgtattcaacatgatttggatcacgattgagccaattgcaataattgacgattgaaagcccatcggtaatccaaccttgagatgatccatgacatctttgcgcgtcacgcgaaaatccttcggccgtaaaacgaggaccggaatgcggcgataaatatatagtaagcataacacagccgcaattatttgtgcagagaccgtcgcaaacccggccccttcaacgcccatatgaaagcctaaaataaaaataaaatctaacacaatattcacaatgaccccaattactaagaaaaagaggggggttcgactatccccaagtgcgcgaatgatattcgaaagtaagttaaacgccatcgaggcaaaaatcccaccaaagataatcataataaaccgttgagcatcaacaatgatgctggccggcgtcttcatcatgaccaaaatatgtcgagcaaataatagactaataactgtcaaaatgatggttatcaccaaactaatcagaatgctcgtcgcaaagctgcgcttaacgccgcgatagtcttgagcaccatagcgttgggctgtcaagatggacaacccagccgtggtccctgtacaaaaaccgataatcagcatgttcaatccacccgttgagccaactgctgctaacgcattaacaccaattgtccgcccaacgattaaggtatcgatgacactatagagttgctgaaaaatattcccaatcaataatgggccggtaaataagataattaatttcaacggattacctttagttaaatcatgcatatcaattctcctttgctccatgttgataacttctcaaattacacaccaaaaacagcgtttacatctgtcttaaattgaattaagtctctcatattcaactttaaagtaccatcaaaaagcatctattatcccactatattagtctataaaaaaacagttaaacaagtcattcagcgacttgtttaactgtttttttaatttgaataggattagttaaagtaattaatccccattgcatcccgcacttctttaagggtttgttctgcaacagcattggccttcttgctaccttcttctaacatcttataaacggcttctggattcttttcaaattcagcacgacgttcacgaatgggtgcgaacttcgcttgtaagacttcgttcaagtaacgtttgatcttcacatcacccaaaccaccagcttgatattgcgctttgagttcagccactttttcacgatcatcatcgaaggcatctaaataggtaaagactgtgttgccttcaatgtgaccaggatcggttactttgatatgcaatggatcagtgtacattgacatcactttcttttcaagcgtttgggcatcgtctgataggtaaatcgcattgcctaatgacttactcatcttggcgttcccatctaaaccaggtaggcgtccttcgccttttggtgggaagaccccttctggttcaactaaaatttcttgtccgtaaacgttgttaaacgtccgtacgatttcacgggtttgttccaacattggttcttgatcatcaccaacaggaaccgtcgttgctttgaacgccgtgatatcagcagcttggctgactggataaattaaaaagcccgctggaatactttgttcaaaattcttttgttggatttcagctttcactgtggggttccgttgtaaacgcgaaaccgtcacaaggttcaaataatgcatcgttaattcgctcaaagcaggaatttgtgattgcacgaagacggttgttttagcgggatcaatcccaactgataaataatccaaagccacttgaaaaagactgttccggattttttcaggatcacgcgcattatcggttaaagcttgttgatcggcaatcatgataaatgtttcgtattcgcctgaatcttgcatcgctacccggttgcgtaatgaaccaatgtaatgcccaatgtgtaatttaccggttggtcgatcgccggttaagataatttttttgttcataataataccctccaatttaatttatcaactcaaaaaaagcgccctaattgtgattaaacaattaggacgcttctacgtggtaccacctaaattgcacgaaaatcatccgtgccactcacgcgataagggtgctacccgaattagttactcactaattcccgattgaaggcccaattcacaaccaacttcttgacgacttctcagtcccgccgcttcctgttcaagaaaatatcagttgctacttatccttcactttgtctgttgaattactgtcatactaacggattttaaaatgaatgtcaatcggtcgcttttttaccccaagacgcttataatataacaactaacaattggaggctgctatgttacacgaagacacaaaacaacaagaacaagcgcgcgttgaccgcacagttatacaggtcgaccaacgcctcacagtgattaaccaacaattggccaacgcctacaatgaaaccaaagacatcgaacaacgttacggcgacaatacgaaagtcaacattaccgaagtcgatgaccgcatggaaaccaacgccgcggtccaacaacaaaagcaattggtcgccgccgctgtcgaaaacgaaaaattactgactagccaacaagaacgcctgaccgatctcgtcaactccccttacttcggtcggattgacatcaccgaagatggtgaaacggaatcactctacatcgggaccgccacttttatcgacgaccaagacaatttcttaatctacgactggcgcgcccctgtttcgagtatctactataatgggacactcggtccagtgacttatgagacgccaaatggccctgtcaaagttgacctcaaactcaaacgccaattcaagattcaaaacggtcaaatcgaacacgtctttgatacgaacgaaactgtcggcgatgaactcttacaagccgtcctcggtgaacaaagtgacgaatacatgcaaaacatcgttgccacgattcaaaaagaacaaaatgatatcattcgcgatacaaccgctgacttactgattgtccaaggagtcgccggtagtggtaaaacctcagctgtcttgcaacgcatcgcctttttactctatcacagccgcagtcagctcgaagccgaccaaatggtgctcttctcacccaaccgtttattcagccattatatttcagaagtcctgcctagtttaggcgagaaaaacatgcgccaagtgacgatggccgagttcttaagtcatcgcttctcaggcttacaggttgagaacctcttcgaccgcttcgaaaaagatcaagccagttttcctgaaatgacacaagccatgcgccggtataaagaaagcacagcgttcatgcacgcaattgaagcttacgttaaacaagcctcaacccaaccgttggcattcaacgatctatacttcgaagaccgcccattttttactaaagaccagatgaatcagatttatctcgcgctccccgcaaatatgttacccggcgacaaattcctcgccactaaaaacacgctcatcaaacggcttaaacgccaaatcaacctcgaagttcatctcgactgggtcgctgaaaaaatcgataccttaaccgatgatgcttaccggacgattgtcggtgaccgcgaattcgattctggcgatgatgaacaagctttcatcgctcgtgaaatcgttcaaagttatttcgccccactctatgaatcaatctacaatgattatttcctagatgaatccacagaatatcaacacttcttaagtggtgcttgccctgccgacatccctacgaaggtttgggacgccatgattcgccaagtcgcggataacaatgaacgccacatcgtcgggctcagtgacgccgccccaattctatacctgcgcgacttattaactgacagcggccaaaatcacggcattcagtacctcttcatcgatgaaatgcaggattacagcatcgctcagttcgtctacatccaccacgcctttcccaacgcgaaattaaccgtgctcggcgattacgcacaggatgtcttcacggcgacctaccaaaccggccacttcatcgatcaactgaccgctgcttttccccgcttaaaaatcaaccaaattagcttaaccaagagttaccgcgcgaccgccccaatcaccaacttcgccaaggcactcttgccaaaagaaacagccctccaagccttcagccgtgacgggcgcctaccgcgcgtcattgagacgccaaacgaccaagcgctcgctacactgacccaagaaatccgccatctccaggcagaacacgcgaccgttgcgatcctcaccaagaaccaacaagttgcccaccaactctacgctagtttaacacctgatgaacacgtcacactcatcggtgaaacaacccgtagtttacccaaaggcatcctaatccttccattatacttagccaaagggctcgagttcgacgctgtgattggctacgacatctctaagaagaccttcggcgcacaatcagacgtagatctcctctacacactcgtcacacgtgctatgcacgatttaacactgattggcgtggatcagctcagtccgttgatagtggcactgccgacggacatctatactaccttacaatcaactaagcaatccatttaagcaaaaaagcctgtcgaaattatcgacaggctttttgaattcgtattttatgcaccgtatggaaaatccaaaccagggactgcatttaaacttagatcagcaaattgttgtttttgtaattcgatatgcgctgcggccccgatcatggcgccgttatcgccgcataatcgaagtggtggcatgatgaggtctaaatccattccggatgccttaatggctgtcgccaaaccttcacgtaaaccttgattggcagccaccccaccggccacaacgagttggcgcacgtttaattgacgcgcggcgtgcatcgttttagtggtgagcacttcgaccacactcgcttggaaactagcggctaagtcttcgtggttcagcgtctcaccgatttgatcggcatggtgcactgtgttaatgaaggcactcttcaaaccactaaagctgaagtcaagattatcttccttgagcatcgcacgcgggaatttaaatgtatcttgacctaagtgggcaagccgatcgatttctttaccagctgggtattgaatcccgaggacgcgaccaattttatcgtaggcttcacctgctgcgtcatcccgtgtatcaccgataatttcgaattcgccggcggctggcatgtacaccaattcagtatggccacctgaaaccagtaaagctaacaatgggtattctaaaggcttaacaaaccgcgccgcataaatatgccccgccatatgattgactggaatcaatggtaagtggtgtgcgtaagcaatcgctttggcagctgtcacgccaattaataaggcgccgactaatccaggcccataagtgactgcgaccgccgttaaatcagcgtaagtaaccccggcctcttctaaagccgcttgtgtacaaactgtgatttgttcaacgtgatggcgactggccacttcgggtaccaccccaccaaaacgttgatgactcttaatttgggtagcaatgatgttgcttaaaataacatgaccgtcttcgatgacggccacactcgtttcatcacaactggattcaaatgctaaaattaattctcgtttttccgacatgactgactcctattgactcaatatccgacacatactgaatgcatcttctttttcctgaatgtaataattgggacgcgtccgcaccactgtaaaacccaatcgctgataaacggcttgagcgcttgtgttgctggcgcgtacttctagtgtaattttttgactgggataatcgtgggctaaactaaccatttcgtgcaccaaaaagtggccaataccacgtttttgataacttggccgcaccgcgatattcgtaatatgagcttcattggttgaaaaccatgcaccgacaaacgctacgacttcagtcccttggcataaaaccagatacaacgatgtcttgcgcttgctcaactcactagtgaaggtccaacgatcccacggcgtctgaccggcatagaccgaccgttcaatgtccaacaatgccgtaatatcattttgactcgcgcgtgctaagtaaaatgtcgtctcatcaatttcaacgcgccgagttgtgtaaggcatttctttcttgacccaaatctggggtttgaggtattccctaaacttgttccacatacgaatcagcgcctcgctcatcatgcgtttttgcccagttaacttctgcttccgtcttgcgtaaataaacgggtccgaagccatggatatccgcgacaggttcagccatcaagcctaattcacccaagacgctggcgtgcggtaaattatggttggcggacacgaaatgcgcgttactacctaatgcagcttgaatctgttcgttaaagtgtgcaacgtcattccccacaaaataaacaggttctgccaataattgtaattgtgccagtagtgcttctagtgaaacgtgttgatcggccacaacggtttgcaatgtcccattttgccactgataaatccccgcgaaaacattgtcgcggcgtgcatcaaacagcggtacaatcaaggcggtcgtatccatcacattggccgctagcaatgctaaactcgaaatcccgaccaatgacttattaagcgtccaagcaaaagacttagccgttgtcaccgcaatccgcaatcccgtgtatgaacccggaccttctgcaacgacaaagcgatcgatatcttcaatggtggtttttgtttgttttaatagttgatcaatcattggaagtaacgtctgactatgtgtttgacgaatattaacagtcatttcgcctaaaatttgatgatcttcaaggagtgccacactcaccgcttgattcgaggtatccattgccaatagcttcattatttcatccttcttctgcttataatccttgttattctagcataaaaagccggtttccacaaaaaaaggcgttatcttcaaatagataacacctactcatttataatactctatcttttaatctaataatcggttcgaaatgcatcacgatgtatagaataatcggatgaatcactaatgtggcagcttccccaatggcccgcgccgtaaagtggaacccaaatggtgtatgactaataatcgacacccaccatgaattcaaaccgaggttaacgattagcacaactgtcacaacggcggcaatcacgcgccaccatgtaatcttttgtcggtagaagtaacacccatagatgaaagcccctagaaacgctgaaagtgtgaagcctgggaaataaccacctgggaccccaatcatcaaactattgatgaggtcgccaataacggcggcaagtcccgcccaaactgggccaaaccaccaccccattaaggcggtgacgatgaatccaaaactaattctgaaaatcgttagtgaaattgcaaagcgtgcaaccaccaattgtaaagcaattaaaacagctagtaaaacaacgcgtctagtgtctagcttaacaccaaaaatctgaccattaaccataaaaagcatctcccttttggagctgccacaaataatactgcggcgaatgcggtactgaaatcgcaagcattgctgcttttcgtctggtgtccacattccgttccaccagcacttaacgcttcagtcctactccgaatttttagaaccccttaaatgtatcactaacgttatttaattacaagcaattgattttcatttttcagcaactcttgcagaaaatttgctatacttacagatgagtaattcggatttaaagaaaggtgttcattaaacatgaagaaaattttagtcctccatactggtggcacaatcgcaatgtctgcggacgaagatggcgcggttgcacccacagatcaaaatccaatggccggctttgaaaagctgttcgataatcaattaatcattgaaagtgaagagttcgccaatcttccttcaccacacatcacacccgctgtgatgttaaaccttaagaatcgaattcaacaagctgaagaagacgggattgatggtgttgttgtcacacacgggacggataccctcgaagagaccgcctatttcttagacttgacacttcccaacaatatccccgtcgtcgtgactggtgcgatgcgctcgtcgaatgaaatcggcgcagacggattacacaacttgattagtgccgtttggacagccgcttctgacgatgctcatgataaaggtgtgctagtcgtgatgaacgatgagattcacacagcacggtatgtcacgaagacgcacacgacgaacgtcgcaacctttagaacgccaacttttggtcccatcggtttggtcagcaaacacaatgcgaatttcttccaagaattaattcgttctgaaatttgcgacatcaaaacccttgtcgaacctgtttatcttttaaaagcatacgctggcatggatgggactttattcgacgccatcaaccaacccaacaccaaagggctcgttatcgaagcactcggggctggtaacttaccaccagcaaccttacccgctgttcaagcgctattagatcgcaacatccccatcgtacttgtttctcgctgtttcaacgggattgccgaagacgtctacgattaccaaggcggcggtgtaaagcttaaacaaatgggcgtcaccttctgccaaggcctcaatggaccaaaagcacgcctcaaactacaagtcggcctcagcgcaggcaaaacaggcgcagcattaaaagaatttgtcagcaacgcaacatcatagagtgcgtcatcaacggttagcttctgagcacttgcctaacttagcgaattgacgctgtaagcgccgatttgataagtgtagcaaagcgcaggaagctgttgatgaaaacacgttttcgatagagtgcgtttgaaacggttagcttctgagcattaactggatttgccgaattggcgatgaaatcgccgatttggtaaattgggttaagcgcagggagctgtttcaaaaagcacgtttcaataaatattcgaagataacaaaagaaagcccatcacaactttatctgtgaatggggctttctttcgtttaaacgtgcttcctcgaactgccttttccggttaactgaataattgggattatggctaagacccgccataatcccaattatcccgttaatcctcaaagccaacccgttcgactcagcgctctttccacgtaatttccgcttctgctgcacttaggtcatccacggcgactttatgccgtgttgtgattatatcatcaactgtgagttgttcgaccatgctttgggtcatttgaccgtattgaatttcgtggccgtagcggatgttgacacttgctacgcggtgtgtcgtcaagaagtcataatcgagcgcatccaacatccattcaaaataatggacgttattaacgtgttgattaccatcaatatcgaaataacgcacacgatattctttggtcgtcacttgttcgggatcaatcttcttaatccgtgggaatcgtttgctacctttaatctcacttgactcgaatggtgccatgatttccggcacaacttgcaccatactccgtgtttcatacgacatcatcacgaagatgctttggacgaagacgcattcgttgccggcttcatcatataaccagaaattccggtaacagaaatacttgttgtaactctcagcttcagtcacaattttaactttttcatccaccttcggcatccgcgtaatcttcatttgatactgcgtgaccacccaaccaagattgagcgcatgcattgtcgcttcaccgacgttgagcgcattaagttgatgctctgatgctaaaattaaaatgttcaccaaggatgcaagcgttaattcgcccttgatatccgtttcgaaatacggaatttgatagttttctgaatattgctttcctggcatggcgtgacctctattctgttaattcgtggtaggcattataaacgacttgctttttcaagccatttgccttagcgaccgtcttaatcgccacgttggggcttgctccttgttgaatctgggcttccacttgttcaggaagggatagcgattccgttgcaactgcactgaccgttgcatctggtgctggatttccagcaactatcatcacaaattcaccacgtaattctgtttcagtcgcccaagcaagcacttcttctaggtcgccacgaatgaattcttcgaacttcttcgtgagttcgcgccccaaggtgactttacgatcggcgccaaacgtactaagcaaagcttgcaacgtctttttcaaacgatgcggtgcttcatagaagataagtgcttcaggcttttgtgccaacgtcgttacggcttccgttaactccttgcctttacgaggcaaaaaaccgtagaacgtaaacggttgtggtgtgatgcccgaagcaatcaacgctgtaatcccggcattggctccaggtaatggcaccactgaaatgcccgcttcaatacaagctttaacgagctcatgaccgggatcactaatcgatggcatccccgcatcactaacttgtgcaatatcgtcaccggcttctaatttttcaatcagcgtttcaatccgttgttgcgtattgtgttcgtggaaactaatttgtttcgtttcaatctcaaagtggttcaataacttctgcgtatttcgtgtatcttcagcagcaatcagtgcgaccgatttcaatgtatcgattgcccggtaagtcatatcgcctaagttcccgatgggggttggtactaaaaataaagttcccgtttccgtcgttttaaaacttgattgtgtttgcatgttctatcctttcaagatgcatcaataatgacataaagacaggccaaaagtaagcatcccttttgccctgccttttttaatcgtttgttcgttcgccgtagatgacatcattacaaaatgcgcaaggctcgttattttcgcgtcgtgacccataaaaatacgggcagatatggaagccttcttcgtaaagattctgtaagttttgttttgatttcgaaagggcttgagccccttccttacccgtttgcggggtggctgatggttccaattcttgcaaatgttcccgcaagtgcttgttttcaatctttaattcagcgtttttctcaaggacttcggcaaggactgctttcatttcactgagcccctcaaacgtcaatttagcttgctgttcaatgtctgataactgttcatataagtctttactcaccgttgatatcctcccgatacgctggttatgcgttttactatgcaattaactttaacgttaaactctctaagacgttttggcaactaatattttgttcaaaaatgcgttgtgcttgtaaagcatattccgtctgagcgaccaactgcgtggtagtcaacgcggcgctggcctggtttaactggctttcgtacgcaccaaaacaaggtgtggcgcctaattcatagcggtaattcaataaatcttgataccataagcccaccaaagttaaaaaggtcttctgctgttggcgatcaactaataatggtaaaatttgcgtctgaatctgcacaaatgcttctaaatcacgttgttcaactttttgtgcccacgcggcaagcttcgcactgacttgtaatagccaatcatccgccaataaggtctgtgcttcagttaagtcacttgtcaaatacaccaataactgcgcttgttgtggcaaaataccagctgcttcaaactgttgttgcaccatttgtggtgccaatgctgccagatcaatcacttgaagccgtgataaaatcgtggggagcatttgatttttattactcgtacataaaatcgcgtaaacattttgcgccggttcttccaagaacttcaacaaactattagccgcgctggcggttaacgtttcagcagcttcaataatgaataagcgttgactggattccatcccgctcttagccacttcttgtttcaaatagcgaatatcggcaatcttaatactcttaccttccggcttaatttcaatgacatccggatgattatgcgtcaaaatccgctgacattccggacatgtccgacaaggttgcccatctggtgtcacttgttgacagaacagacgcagtgccaaccactgtgccaattgtgtcttccccaatccctgtgcaccagctaatagataaccatgcgccatctgtccacgcgcgataatctgggcaaactgggccacaagtttgggttgaagctgttcaattgttaaactggccatcgattagaagcggtggaactgttcaatcggcatcacaaagacggttgccccaccgacttgcacttcaatcggatatgacattgagctatccatcgtggcatccatattaacaggcggtgtcatgaattgttcgcgtgcctgacacgttttttcaataatcttaagcgcttcaggaacccgttcgtcttcaattccgacgataaacgttgtattcccagattttaagaagccaccagtcgttgacaacttggttgcccgaatgttggcatcgattaattcgctgcttaataagttgctatctttatcttgaacaattgctaaaagtaatttcatttcaatctccccttttctatgctgtgaataagtctggatatcgttgttcaatcacttgcagacatttggcaacaactatgtctaagtctgcggtcgcatcaatcgtttgaatccgctctggattatcttgcgcaagttgtaagtaggattgccgaactttttggtgaaaagccaacttctcttggtccaatcgatcatattgatcctgtcgattctgtttaatccgttgtaaaccgacttcagatggtacatcaaggtataacgttaaatcgggcgctaatccattagtggcaaataagttcatttgcgcaacggcttcctcaccgatgccacgacctgccccttgataagcgattgaactatccacaaatcgatcacaaatcacgattttgttatcagccaacgctggttcaatcttttcaacaatgtgttgtcgccgagcggcagcgtataacagtgcttcggtgcggtcatccattgccgtattttcaacatctaaaatgacattgcgaatcttttcggcaatcggattgccacctggttcgcgcgtaacaatgatgtcttggttgcacttggattcaagtagcggtacaacagccatcaacgcacttgtcttaccagcaccatccggcccttcaaacgtaattaattttcctaccacaaaacaaccttcttcatccatagagttacttccattttacttgattcaacaaaagacgtaaagggaagagtgcgtatccggcggttatgttcttgcgtttagcgtgcgacagcagacgtttgaaacaaaaaaagacaaagtcactcgaccttgtcttcacgctgcggctgtcatctgaatgcccgcgctatctaaatgtatttctagttgctgcttctttcgaaactgcttcacctgctactttacgttggcgggcttggcggaataagaattcaaactttgcttgttgaatcttactttccatctctaattggtcatcgagtccgcggacgttgtcttgcgtcttttgggccatctgccacttatctttgacttggtacactaaatccaataaggcttgatcacctaattgttttaatgtcggtttttttctaccaaacatcgcaaacccaccattcttaaatttcttgacgcccttcaaccgcttttaacaacgtcatttcatctgcgtattcaatatcgctaccgactgataaaccgtgcgccaaacgcgtcactttaatcccagctggtttaatcaaccgcgaaatatacattgccgttgcttccccttccggtgttgcattagtagcaatgataacttctttagccggtgttttttgcaatcgtttaatcaagttggcgatgttaatatcatcgggtcccttgccttcaatcggtgataacaccccatgcaagacatggtagagcccatgataatcattcatccgttccatcgacatgacatctttcggttgttcaaccactaagatcatgtcttgactccgcgttgtatcgcgacaaatttcgcacgggtcttcatccgtaatgttgccacagacactacaataatgcagatcacgacgtgccgaaattaagttcttggcgaaattcgtcacatcgtcttcattcatatcaatcgtgtaaaaagctaatcgggttgcggtcttgttcccaatcccaggtaacttcatgtagctttcgatcagcttcgcaattggttctggatattgcatcaatgcacttccttaatgtctcacttaaaatgggaggcctttagtaaatttacccatttgggcttgtgtttgtttatcgatttcagtcatcgcttcgttagttgccatgataatgaggtcttgtaacatatcaacatcatctggatcgatggcctctggtttaatggcaatgtctttcatcttcttgtcgccagtcattgtgaccacgactaaatcgttggctgctttgccgacaaattctgtattgttgagggcttcttgtgtttgccccatttctttttgcatcttttgcatttgtttcatcataccttgcatattacccattccgcgcatcttcattacttcctttcaaatttaaacgttaatcttttttaacaaccaccgcatcgccaaacaaagcttgtgcttgttcgacaacggccggtttttcttctggtttcggcgttgcttctgcttcgtcatcagttgttacctgttgacttggtactgcgtgattctgtaaatattcctggcgaatttctggccaaacatcgtggggcactaaaaccaccttgaaggggttgccagtcaaacgattcaagccgttttctaaaatgttcaaaagatcttgatcattgctagctcgctcgaataaaatcgcgtagttaaacgcgacgacaacgccactttgactcgccgcaaccggttcggaaaccttcatcacggcgcgcttggtaacgtccaacatattcaacagatccggccagacttctttgagattctccaaattggtccgcgtcgcatctgccaataccggataaatcgccttacggttgacctttttactaatcttcttagcaggtttggcctttggcttggcagctggtgcactcactggtcccgccgcttccaatttttgtaacgccgcttgtaattgtgcaacttgttgactcaacgctgcgacttgttcattatcagcagctggtgcggcaaccatcgtagtcgttacttgggctgtctggacttgcgtcaagcggaccgttgcgacttccagatagatttctggatggttcgtgaaacgcaattgctgttgcgtttcattcaggatatcaatcaccccgtacaaacggtcagccggcatcgctgcactgagcgctttgaagtgttcatccaatagatccatttcacttgcggcgactaattcgggtgcttgttgatacaacagtaagtcgcgcacatattcaattaagtcttccacaaaacgttgggcatctttaccttcagccaaaatctgttgcaacaattgcaacgcttgtttaggcgcattatcctgaattgtttggacataatccgccaacaacgcttcggttaagctgcctgtcacatccaacgcattatccaacgtgacgtgattgtcgctaaaggataacacttgatcgagaatacttaaagcatcccgcatcccaccttcagcagctttggcaatcactttcagagctgctggatcataggtcatttccttttgatctaaaatataagccattcgcttaaataaatcagcggccgtgatccgcttaaaattaaagcgttgcgtccgcgaaatgatggttgctggcaccttgtgaacttccgttgttgcgaggatgaataccacatttgttggtggttcttccaacgtcttcaacagtgcattgaacgcaccagtggataacatgtggacttcatcaatgatgtaaattttataatcagcttgggtcggcgcatatttggccttatcccgaatatcacgaatctcttcgaccccattattagacgccgcatcaatttcaatcacatcattgagggcgccagccgtaatggcccgacatgtctcacattcattacatggttcgccatctttttgataatgacagttaattgccttggcaaaaatcttggcagccgatgttttccctgttccacgtgggcctgtaaataaataagcatgacttgtttggtgcgtcataatggcatttttcaatgtttgggtcattgtttcttgcccaatcacgtcatcgaaacgctgcgggcgccaaacccggtataaagcttgatagctcatttaatgacctccacctttgcaatttaaagtccgattcatttaaaactacttgttccattttagcatattttaccgtcaattttgattgcgttgcatgaaaaaagacccaaccgacaaaattaattgtccgttgggtctggttaattttcacaaaacttaagacacatgataaaacaaacttagtgctgctttcttccgaacctgacacgattcgtaggctcatcattgtctcaaggcctttcggcaattcctattctacctgattcaagcattaattaccagccattttcttttttttacggcgattttcgcgaatctttctaaaaaaagtctgcaataaactcgcacattcagcttctcgcaccccgccaaccacttcagcttggtgattgaaccgtttgtcagttaataaattcatcaacgtgccggtcacaccagccttaggatcactcgcgccaaaataaactttgggaatccggctattgataatcgcgcctgcacacattgggcatggttctaacgtgacataaatcgcggtatcttccagacgccaactcttttcaaccatacaggcttcttgaatcgcgagaatttcagcatgtaacgtcgcatcttgcgcgtgttcgcgaatgttatgcccccgtccaataatttgtccgtctttaacaatcacggcgccaatcggtacctcgccaatgatgcgtgcttggttagcttcatcgatggcggcttgcatccattgatcgatctcttgttgtgtttcactcacgcgttagtcgcccctttattttacttctcaactattaaaacacagtcgcgctagtcgagcaattaaaaatggtgccgacggattgtcgataccatttttaattgctccataagccatcctcttccgtttaactgcaaaatgagcattatggcaaggactgccataatgctcatttcactgttaatgctcaaagcctgaccaactcgagtcgcactctatagtttttctttcacctttgttgcgtaagccattagtgtttggcgcaaatcatccatcatatctggtagattgtctgcgtgttctccgagcttatcttttaattgggttaacctgtctgccgcagtcaacaagttattcacatccgcatcggagagttgatcgaccaactctaacgccttttgattaccatgtaatttgtcttttacaaaacttttaactgctaatcgtttgcgatagcgcgatactttatcgattactgccttagaaccgacaaaagcggtcgttgcgccaactgctgcagtcacccctacgccgattaaaattttatatctggttttcatcgtatcaacctccttgtactttaatcatagtttagcacaattcgcctgaatttaccgctttcaaccccggtccttactttaatttaatactttggagaatgtaataccccttatccttatgaataatttgcacgttgccaaaaatgctcatcatcgttttcttcgctgatggggcaccttgtttcttttggatcacaacgttcaattcaccatctggtaataagtgatcataggcaccagtcaaaatattttgcaccacatcttttcccgctctgattggtgggttggtgaagatggcggcgtattgatccgttacgttttgatattcagctgattcgaatacagtaacgttggtaatctgattcaattcactgttcttacgtgccaaatccaatgcccgttcattcacatcgaccatgtcgattcggcgctctggtgcgagcttagcaatcgtcatcccgattggcccgtatccacaccccatatcaagcactggaccagctggcgcttcactcagatcgaccgctgctagcaatgcccgtgaaccgtaatcaacagtgcttttagagaataccccgttatccgttgtaaatttaaaattaaagccgtgtaattcaaacgtccattgccgctcagcgtgttcaacgtctggatttttagaatagtaatactctgtcatcttttttcctcatttgtcgttagttatctgaaaatttcccaatttgaactgacttcatcaaacgacctagcaagccaccaggatgcggttgatccgcaacccgttgattaacgaccattaaaacttgaaccatcgtgaaaattaatgaggtccgtttttgataagcgatatatttcgaacgccattccgtcgtatatttcttcttataggtccgtaatccctggaatccgtagaagtgatagccgtattcatagatcagatgagcgattcgttcttcaataaagctaaactcggaagtccctacatttgcaagaggcgccatgccgaggttgaagtacgtgtagccatccgttcgattttgttcaaagagattaataaagatctcatccattataccagatggcgcgtcttgtctgtgacgcattagatcaatacttgcgacttctttggttcctgttggcatttcgttagcgaaagcaattaattggtgatcggcattatagacaactgcaattggggctttttggaggtatgcttcatcgaaaaagcctaacgagaagcctttttcaacgcgactacccaaccaatcatcagaaaccgctttgagttctgccattaattcggcactaaatggtgggtttaaaatttcaaattgatagccttcacgttcaaacttattcattaaggcgcgttcagcccgccgtttcttaccagtcatcgtgaagtccgccaaacggacgtagccttcttcaccaaacttgataaagtcaaacccgatttcatgcagttgcatcgttaattcacttgaaatttcgtagaacgctaaatgacaatcaatcaaatcagcgtcgtgcatcatctgttcaattgccggtaaaattttagccggatttccgactggttcacccattacaattaagcgatccgcttttttacgataaagcaagaatacctgatcttctccttcttcctgatagaaataaactgatttatcccgtaagtatgccaaatgactgacctcattgccgccgtaagtgttaatcacgttagcaattcgtgcttcatcatatggcgctgctattgaacggccccctcgactgagataacggtagacgagatataaggtccctgcggcaaccaacatcccgataaaaccagccaaccagactctttcggatggaaataaaagcgctgttggtacgggtttgcgatgccgtaagtgtggcgaattggcaatcccaacaaagccgtataacaagaaggcgcccacgaaaagtacaccatccacaatccgatcattccatgaaaattcgatccgttcacggtataattcgcgtttcaataagaaactagctacgagcacaaaagttaaaaagacagcgagtttgattgagaaatcccgccatagtgtattggtaatcgcaatcaccaatagcaccatcaacggccagaaaactttttgaacgcggttggcaacgccgcgggctaaggccaacatgacaaacgctacaatgatgtttgtcacacgatctaagaagaagaacgtgtatgggtagagctgtccaatcactgtgttggtaatcgcaaagttcgggacagttgctactaataatagaatgatgcttgaaatataaaggaagaaaacaatgaagtgatgagcgattttttgcatcacctgccgaggtaagccctgtaaataatgatttaaccggctgcctgcatcgtgagtaaataaaccaacgccgactaaaaacggcacgatgtaataaaagactcggtaaaatgacaaccagacaacggcgtccgcattttgaacgccgactgcactcagaccaaagatcatgaacaaatcaaacgttcctaagccccctggtaccatcgaaataacaccaatgatgttggcaatcatgaaaagtggtaagacttgtaataagtcacccttaatctctaagaaataaccaatcgttaagaaaaagccgcccgcaaaaccccattctaagaaagaccctaatgttaggcgtaaaacgcgttgcatcgaaagatctttgaaaaaggccgcatttttaaagcgcgtactaatcatcagaccagggaaatacaacgaaccgcccactagccataaccagtagttggcatacatcccaccaataccaaagccaaagatcaaaacgacactaatcagacaccagattgacaggccggctaataagaacagcgcaatttttgaaatcgcaattaagatttctttttgtgacgcttttttaccatagaaattggcccgtaaactcgcacctaagaagcccccgaatccggcaatgttcgtaaacgtattgacgatccaaccagatttgactttataccagaatgaatagtcctccggcagcaactccgcaatcacgaaatcataattgagcattggcaagaccgccacaaacccaatcaccagcatcgctagcaaggtccacggactttgtgtcgttaaactcgctttcaattgttccccgttcaagtcccggaaaatccggccgacttctaggataacaaagaccatcaccgaaaggatgaagatgccttttaacaacgttaggtgtcgctgaattccttcatatatgtgtttgccccattttcgcatatcaaccgctccttaacttaattaatttaattataagctatcccaaggcaaaacacagtaaaatgacaattatgttagatggctgttagattatgattttcgcttattacttacccggagcacaatccgattcccgttcacccgacaatcaatatcctctgattgcctttttagttctcaacagcaatggctgtcgcttaagatatggaatccatatttagcatcgtgttattttgtgcaactcgccatttatgttttacaaaaaaatatgtaaaaaaagaaccccacattagtggggttcttttagaaataaaacgtgctttcattaactgctttctgcgctttgctacatcagtcaaatcaccggctgattaggcaaatgctcaaaaataacccgttaatgacgcactttattttgaaacgtgccattggcgctagatttctgcgcttaactacaaatcgggcatcatggcttagatcgccgcgatgcccgattttaggttagtgctcaaaatctaaacaagcgccaagggcgctctatttaaattatttcaagttaacgacagcgccaacttcttctaatttagctttcatttcttctgcttcgtctttagcaacgtcttctttaagagctgaaggagcgttatcaactaagcccttagcatctttcaagcctaagcctgtgatttcacgaacggctttgataactttaaccttttcttggccgatttctgataattcaacagtaaagctgtctttttcagctgctgcgtctgcgccagctgcacctgctgctgctactggagctgctgcagaaacaccgaattcttcttcgattgctttaactaagtcgtttaattctaagattgatgattcttttaattgatcaacaattgcatttacgtctaatgccatttttgtttcctccattttgtgggtaatattttttgataacacttttaactacacaattttaaattatgcagctggttcgtctttgctgtcggcaactgctttaacagcatatgcgacattgcggactggtgcttgtaatacagaaagtaacattgataataaaccgtcgcgacttggtaatgtagccaaggcattgatttcatcaagtgttgccactttaccttcgatcataccacctttgatttcaagtgcatcagcactcttagcaaagttagcgatgatcttagctggtgcaacaacatcttcgttagaaaatgcaactgctgtagggcctgtgaatgtatcatccaaaccttcgtaaccagctttgtctgctgcacgacgcaagtaagtgtttttaacaacttccatttgtacgccagcttcacgtaattgtttacgtaattcagttacttgttctactgttaagccacggtaatccataacgacgatagaaacagcactattgaatttttcaacaactgtgtcaacaatttgtgctttttttgcaatgattgtttcgctcaattgattcacctccattagatttgtaaaacttgtggtcaagagttccttataaaaataaaaaactccatgtccaccaagacatagagagggatttcaacgtatcttcctcggcaggatattaagcctattggcacctgagtcttcggtagcataaataaccaactacaaatatagcatggattccataaagcgtcaatcattatcggcacttaattttagttatcctagcattacgttttacttattttatttttctgaaaaaacggtttaaaattgagactatcaagaaaattaatcgtaagaggtgcagttttttgaataatattttagtcgttaacgcgggtagttcatcattgaaatggcaactattccaacaatctgatttaaccttactggcaagcgggctcatggaacgcatgaacacaccagaagctagcttcaccttcaagttccaaggtcaaaaagaacaagtcgccattgctaatctttcctatgaagatggtgttcttcgacttttgaaacaacttgaagacaatggcatcattcattcacccgcagacatcattgcagtcggccaccgggtcgttgccggtgctaccacgttcgaaaaaccaaccattattgatcgcaccaacttagatacattaaaacaactcgacaagtatgcacctttacacaatcccgtgcaagttgactgcattgaaaccttgatgcatattttaccaactaatgtccctcaagtggctgtctttgatagtcaattctatctcgatatgccagatgaaactagtttttatggcttaccttatgaatacagccaagactatcaaatccgcaagtatggcgaacacggcattagtcacagctatatcttacaagcaacagctgactttttgaaagaacccgttgccgatttaaaattaattacacttcatttgggtggcggttcttcaattacggccagccaaaatggtaagcctgtcgatacatcaatgggcttcacaccgttagaaggcgttccaatgggcactcgtgctggttcattagatgcggccatcgtcccattcttaatgaacgaattggataagagtgccgatgacgtcatcacgcttttgaacgccaaatcagggattctcggcgtttcaggcgtttccgctgacatgcgcgatattcaatcaacacgcgctaccaatccacgggctaaactcgcctacgacatgttcatcacttctgctgtgaagttcatcgcgagctaccacgttgaactcggtggtgcgaacgtcatcactttcacagccggcatcggtgaaaacgacgcccgtttacgtgctgatatctgtgccaagctggctgttttaggcgttcaaatcgatcttgaattgaacgaaaacggctcaggtgcccgtcaaatcagtacccccgattcaactatcaaagtcttgatgatcccaaccaacgaagaattagcgattgctaatcacgtcctagcaaccatctaaattaatcgcgaattatgagagagccattagcgtttttcacgctaatggctcttttttgataaaataaaccctttttatcaccaaatcacgaacgatatttacaaaataataaatatttttcacatttttcttaaaaacacgattgttttgttgtacaataatgccaaggttcttaaaatactaattcagaggtgcataatggataaaaatattgatattgcaacagaatcacgaacgaactggttcgaacgtcaattcaaaattaaggcaagtgggtcgaccattaaaaccgaaatcatcgccggaattaccacttttattgcgatgtcatacattttattcgtcaacccaactatattaggcgacgccggcctagataagggggccgtctttgtcgccaccgcattaactggagtggtcggctgtttagccatggccttcatcgccaactacccaatcgccgttgcacccggactcggcagcaatgctttcttcgcctattccgtcgttttaggcatgggaattccttggcaaacagcacttgccggtgttttcgtcgcttccctccttttcatgcttgtcacggtcttaaaagtccgcgaagtcgtgattaacgcgattcccgctaatttaaaagccgccatggccgtcgggattgggttattcatcgcctttaccggattaaaacaagggggcatcgtcgtcagtagtgctaaatcattcgtcaccattacgagttggtcagatccgcacgtttggttgaccgtcttcggtttaatcgtcaccgttgctctattagcccgcaaagtccctggcgctttattcatcggtttggcggccacagccaccatgggagtcgtgactggtctaatcgcaatgcctcacagcatcatcgcttcaattccaagcttagcacccactttcggtgtctcaatcatgaacatccacaacgtcttcaatgttcaaatggccgtcgtaattctcgtctttttcttcagcgtcttcttcgatacaactggaacggtaatcggacttgctcaacaagctggtttcatcaaggacaacaagatgcctaagtaagtcggcaaagcccttttcgccgattcaacctcaatgattgccggttccgttttcggttcaaccccaactgcttgttacatcgaatcatcaactgggattgctgctgggggtcggactggtttcaccgccgtggtcgtcgccatcatgttcgtcttaagcttattcttctcacctttactggccgttgtgacgtcgcaagtgactgccccaatcttaatcatcgtgggctcattcatgatgaagtcaattgccaacatcgactggtcagaattcgaaacttcttttgcagccttcatgattgttctgtgcgtcccattaacctataatatctcatacggtttagcattcgggctgatcacttaccccatcaccatgattgctgctggcaaaggtaaaaaagtgcatccgattatgtatgtcgctgcgctcttattcctattattactcttcacaatgcacgaattacctgctaaataaaggagattactcatggataaaccaactttaaaacaactaattgatcaagctgccggccgtcaagctgccgacatggtcattaaaaatgcaaaggtcgtcgatgtctataatggccgcattattgaaggcacactcgcaattggtaatggtcgcttcctcggtatcagcgacgactaccttgcaccaaaagttatcgatgcacgcggccaatatgttgtgccaggtttgattgatccgcatattcatatcgaatctgccaatgtctcacccgctgtcttcggatcacttgtaacaccacatggcacaacgacgatcttggccgacccacacgaaatcgtgaacgtcgctggcatgcggggcttgaatacatggtcgcatctgccaaaaagacagcacttgatatcaagtacaccatgccctcgtgtgtgcctgctgctaatccaaacctcgaaacatctggtgctgtaattaccgctgatgagattcaacaatcttatgaccaaggcctcacttacggccttgccgaattcatgaattatcccggtgttgtcaatgctgatgatggcgttttagacgaattactcgtttcactcaacgcaaataaactcatcgacggccactcacccgctttaaaagaacaaggcttaaacgcatacgccgctgctggtattcgtaacgatcacgaatgtacccaagtcgatgaaatgctcgatcgcatcagtcgcggtatgtatgtttatctccgctacggcaccgtctctaagaatatgccaacccttttgaaaggcgtgacgccgcaaaacgcacgtttctgttgtctctgcggtgacgacttacaatccgtaaccctccgtgaaactggccacttggatgaaagtatccgcgttgctatcgcaaacgggatcgaccccatcatggcaatccaaatggccaccatcaacactgcccaatgtaccggcttagctgaccgcggcgggattgcacctggtttgaaggccaatttcctattggttgatgctctcgaacaattcagtgtgaatcaaaccttcatcgatggtcaaaaagttgctgccagcggcgaatacctactaacaactgaagattcagttactggttttgatgacttgttacaaaccgtacacctcgatacattcaccgctcaccaattaaaactcaacctcacaagcgataaaacccacgtgatcggcttacaaagcatcagtcggacgcaaaatctcgtcttaccggtcgctcacactgcagacggtgatttccaatatcatcctgacgaagacatcgctaaagtggccgtagttgaacgacatcatctcactggtaatgtcggcgttggcctgcttaacggcaacggtgcgattgccaccagcatcggccacgatagtcacaacctcgtagtagtcggcaccaacgacactgacatagtcgttgccatcgaagcgctcaaagaaagccaaggcggtggcgttgctgttcaggatggccaaatcatcgcgacattaccatttgtcatcggcggcttaatgagtaacgaacccatcgacactttaattgaacatcaaaaggccttcaatgctatttgccacgataaactccacgtcaccgctcacttcgatccgactatgaagctcggcgcaatgccactcgacgtcatcccgaacttgcggattactgacaaaggtttagtggatgtcacaaaattcgaaattatcgacattaatgcttaattatagcaacaaaaaaagcgctcatcctttcggatgagcgctttttgcattaccaacttagaagctagcaacgtcaactttgacaccagggccaaatgttgagctaactgataaacttgtaatgtattgacctttagctgaagcaggacgagctttgataatcacgtcttgcatcgctttaaagttttctactaatttagcagcatcgaatgataccttaccgattggtgcgtgaacgataccagctttatcaacacggtatgccacttgaccagctttaatgtcgttaactgctttagtaacgtccattgtaactgtaccagtcttagggttaggcattaagcctttaggtcccaagacacggcctaaacgacctacttgagccatcattggtggtgtagcaacggcaacgtcaaagtctaaccagccgccttggatcttttcaactaaatcttctgcgccgacaacgtcagcaccagcagcttcagcttgttttgcttgttcgccttgagcgaaaacaatcacgcgttgtgtcttacctgtaccatttggtagtacgacagcaccacgaatttgttgatctgcttgtttaggatcaacgtttaaacgatatgcaacttcaagagatgcatcgaattttgcaaaatcaactttctttactaagtcgattgcttcttcaacagtgtatgctttagtagcatcaacttgttttgcagcttctaaataatttttaccttttttagccattagggttttcctccttgcaattgtggtgaacggtttttgacctcccacttgatttttcaactttcattgaaaatccgactgaaagtgtcaagcatgaattaaccttcgacagtgaatcccatgcttcttgcagtaccttcaaccatgcgcatagcagcttcaacgtctgcagcgtttaggtcttgcattttagtttcagcgatttcttgcacttgagctttagttacagttgcaaccttcttagtgtttggttcgccagaacctttttgaacaccggcagctttcttcaagagaactgctgctggtggtgtctttgttacaaagtcgaatgaacgatcttcataaacagtgatcacaactggaattaataaaccagcttggtcagctgtacgagcgttaaagtcctttgtaaagcccataatgttgataccagcttgacctaaagctggacctactggtggtgctggagttgctttacctgcaggaatttgaagtttaacgatgtttgctacttttttagccacgaaacatacctccttaagtccgtgatgtggttaagatggccattatatttggtctcccactagtgtatgaaaacataccttaataatataccaagcaattgccgaaaaagcaaggcgattccattaatcgcgccacaagaaatcatcaatggcttgatcaactaaacgattttcgtgcaacatgctatgtgctccacccggtccacgaactaacatctcctggtaatggcgcacgtgtccttttaataggctacgcaatgcaaaactactatcgactgctaccgaaccatcgtgtcgattagttcctagtaactcgccagcaatgtttaagacactgatcgcagttggaaaatacttggcccgcacggctaaataattataattacgtgttcgtttaactggtccacgactggttaactcgctccaaaaaacaagtggtgtatccggaccaattgatggatcattaactggcgctgccaacaatatcactttgtccaccacggcatggtctgatgtcaacaaataacgcaacaccgtaattgcgcccatcgaatgccctactaaattaacttgcgtaacgccatacgcttcttttaagtgttcaataatcgcagctaaccaacggacttgatcttgcacatcggcgcggttattagcaaataagacttgaatcgttgggttattagcctgcaacgccgcgtctccatccacatgcaatcgaccgtttctgcccacccaaatgaccatgctcttcttagcaattccggctttttgtaggcgcccgagtaagtgaccgaatgaatagcgattcccccgatagccatgaatgaatagcgttggttgttttgtatataaacgtgcgcgcggccgccaatgtgccgaaacccggattaatttgtaaaaatccagtcctgccagtaagactaacaaaaaaatgactaagcccactgcaattaatatttgatcaatgatataccacatcgtcatcacatcattctttcgaaatagacactattgattgttcaaaaaaagcggctgagacaaatcatctttcgtctcagccgcctatcttgttggggcttgggacaaatcctagccccctactttaattgttgaaacatgctttttgaaattgactcttgcacttaactacatttgtcaaatcggcgcttgcagcaccaattcgccaaattaggttaatgctcagagtcaatccgtttcaaacgcactcttttttcgaaacgtgctccttcagtcatcccgactgaagtcgcactctaaactagttcgtctacttggtcgtagtctaattctgttgctgtttcacgaccgaacatgtcgatattaacctttaatttcatcttttcgtcgtcaacttctgtaatttgaccgacaaggccagcaaaggccccttcgataatcttcacagattcgccgactttgaactcaacatccaaatgacgagtgctcatgccaagttgacgcaagatttgtgtgatttcatcatctaataatggggctggtttgctacctgcaccgtgtgaaccaacgaagcccgtcacacctggtgtattccgcacaacgaaccaagcttcgtctgacatcaccatttcaaccaaaacatagcctgggaaagtcttcttcatgtcgactttgtccttaccgtttttgatttcatgttcttcttcttcaggcaccacaacgcggaaaacattgttctccatccccattgattgggcacgcgattccaagtttgccttcactttattttcgtaacctgaatatgtgtgtaagacataccagcttttttcgattgattcaaccatgtgcgttctccttttaaataccaaaataaaaaaactccgaccacgcgaagttttttgcttgccattagtatagcaaatccgacttaattaagccagttctaaaagataaataattgtagtacttttaagattgcaaaatcaacaacgccaaagaaaatggcgaataaaacggaggtcatgacgactgttgatgtatctttacgtgtttgtttggcatctggccaactaacagttttcatttcctgaccaacactcttaaaaaacttaatcatcttatttcctcctaattagcgcgtttctttgtgttgtgagtattgcccacaatgtttacagaatttgtttaactctagacgttctgtccgattcttgttctcagcaacatagtagttacgtgagccacagacagtacaggctaaggcgactttcttaacacccatatgaaaagcccctctctaattgacgtttatcccatttactttatcatgtgttgaccaaactgtcaatgtggtggattatccccaccaggtcgtgcggacaatcgctaataacaagctgacaatcaagctaatattgatcgccatcgcattttgaatcgcggtaataaaggtgacatccttcagttgccgtgtattaaaccggcgattattgcgcaaaatgacaggaatcaataataacaatagtaacgattcaatcggtaagaccttcgtaatcactgccacaacaacggccactagtgagaaccaaatcaacgtattatacaaccgcaacgcccaggttgttcctaaataatgcggcagtgtataacgttcattgcgccgatcttgatctagatcacagatattatccgccaacataatgttcgaagtggggattgcaataatcacaccgattaggcatagactaagcaatgttggtaattgacctttaagggtaaacgttggccaatcaaaatggagcgccatgatgctgtcgcttggtacgttgacatagaccatgataaaaaatgcaccaaatgattctgtcacaccactcaacaattcaccaaccggcatccgcgatagcggaactggcccgaacgtgtaaaagacggccacaaaaatacaggcgccaccgattaatagtaataaaatgttcgtttgccaaaccaaccaaattccagccgccatgctgaacaataaaaaatagagcattaaatgcagtgccttggttggcgacaaatgtttgcgcccaatgatattcgtctgtgcccgataatccagatcaactgctttgtagtaatccatcacattattaaagccagtcacaaataatacaatcgaaaactgggcgacaaaataaacaattgtcgtcactggattcagctggccattaacgtaccaacaataaacaatccctaagattaagggcaagacactcgccgtcttgacctcaatccggacaaattctaaaaacgttttaaaagacatctcggacttccttccattaaaaaagctaggacaaattgacttgtcctagcttcatcgtaccttctagcagacagttacccattaattcattggcagctgactgccgaagtcccgttttattcaccgtaaacgatgttatcaactgtaatcgttgctgtatttcctttttgtgcagcattgactaattgttcagcatagttgacgaagctgtgtgatgattctgttgcaccagaaacaacatctactttgcctggttcttgtgctttgacgaattcagaattcaacttagcgatgtattccttaggatcagtcttagcaatcttcttcatttgtttgttgtatgcagcatcgtcagcttttgacttgccatctttattgatgttatcgaatttagattcagtgattttaccgtctttaaccaccattgtgaaaactgttcgatagtcatggctgtaattcttttcttctaacttatatgtgccatcttgcatcttagcaccattgtcgatttcgattgtttcagtgttgccagcttgagcagcttgcactaattgttgtgcgtaattcttaaatgaatttgagctatgagttgcgcctgatacgacttcgatgcttgaaacatctgcacctttatctgtaaattctttgttcaacttaggaatatattctttaggatttgtttttgaaactttcttcattttttcgttgtatgtcttgtcatcttgttttgacttgccatctttatcaacgtaatcgtaagttgtctttgtcactttgccgccggcaacggtcattgacatcttaacgcgataattattttcgtagttcttttcttctaagttgtaagtgccgtcttttaattcaccgccggcaacttgtttcttagcggttgcttttttgcttgatgattctttgactgaactagattttgcctcttttgaagatgaatctttagcgttattactattaccacaagctgctaataccattgctgacattgcaacaactgataaactagctaatgctttacttaatttcataattttcccgcccttttcataaataatcatatagtttgtatcaaccttcacacaaagtcagtttatcttttttatgtaaaaagttcaagtcttttaaatcacttattttacggcgattaactttggttttacacaatttaaaacggtttccttaatagtcatcaatcccattaatcttatccgtgaataaatagacaatctttagtttattctgtataatggatactgattgaaaacgcatttatttcatttaggggtggctcatcatggctcaaaaaaacatcgtcatcatcggtgccggttttgccgggatctatgcgactaaaaaacttgcgaaatattacaagaagaatccagattatcaaattacattaatcgacaaacattcctactttacgtatttaacggaattacacgaagtagctgctaaccgcgtgccagaagaccacgttcaacacgatttgcaacatctcttctgtcgccgcaaaaacgttaagttggtgaccgatacggtaacccgcatcgatcaagcaaacaaaaccgtcattactgaacatggacgctacgcctatgatcaagttatgttggggattgggagtgaacctaacgactttggcacacctggggttgccgaacatggtttcactttaggttcatgggaacaggctgttgaattgaagcaacatattatcgatgttgttcgtcgtggggcaattgaacacgacccagaaaaacgccgggcccttttgaatatcgtggttgttggttctggctttaccggaactgaaactatcggcgaattacgcgactggcgtgatgaactagcagctgataacaagattgatcccgaagaaatccaatttacaatgatggaaatggcaccaaccatcatgaacatgctcgaccgcaacgatgcagccaaagcagaacgctacatggctaaacaaaaaattgatgttcgcaagaataccggtgttacaggtgttcacgaaatgcatgttgatttaaatgatggttcaactttcccaactgccactctaatctggacagctggtgtcaaagcttcctcacaagcggcacaatttggcctaacaaccggtaaagccggccgaatcgtgacaaacgaattcatgcaatctgttgacgatgacaagatttacgttgtcggcgatgtggctttcttcgatgaaactgatgacggccgcggtcaaccccaaattgttcaaggcgccgaagcatctgctgcaacagccctaaagaacatcatcgcaactgaagaaggtaaagcaacagtcccatacaaagggagctattccggcttcatggtttcaattggttctcgctatgcggttgccaacttgatgaatttcttccatctcagtgggttctttgccacattagttaaacatttagtcaacatgctctattttgttcagatttattctggctacgatttattccactattcaatgaatgagttcttcagaacgaagaacgatcgcaacttgatgcgcggtcatatttcacggtatggtaatgttttatggacagttcctgcgcgaattttcttaggcgcaatgtggcttgttgattgttgggacaaggttcaaggtgaaggttcttggttcaccaataagctccggttaccttttgactggcttcaaccagctgtcaccagcggtgcttctaaagcggcggatgcaacaagtgctgctagcggtgccgctgcaggcggggctgctgaaccagcaactgctaaagtcacattcggcctttcttacttattcggtcatgatccaatgcccgtcttcgataagatgccccactggttctacagcatcacgaaggtcttgattccaaaccaagaagtcgccttcttcatgcaaaaaacaatgaccatcattgaaattttaattggcttagctttaattgctggtctcttcacttggttaacgagcgcagtaaccgttgcaatggttatcacattctgcctttcagggatgttctattgggttaacatttggattattccaatggccctcgcctgcatgaacggttcaggccgtgccttcggattagataaatgggttgttccatatttacaaaaacatctcggtcactggcgctacggccaacaacgtgcactatacaaaaatcaatgagtgcgtttgaaacggtttgactttaagcattagcacagggaagcgaattagcgacatagtcgatgatttgattcacagcgctaaacgcagaaagttaacttcaaagcacgttataaaactgagtgcatcaaaagcgtttattctatgcggattagcaaaattagacgaataactagcgtagctagttgtttggctaatagtgctaaacgcaatagaatgcttttgaaagcacattataaaagcaattcacagctatcaaaaggagggggttatgacagacaggcttttgtcataaccccttttattgctattttagagagaaagactgacgcctatgtttaaacaaattcgcgctaaccgttacatcaaaatgattcgccctggtgatataatagtagtcatcggcctgtttattctatcgtttgccccagttgctgtttttagttggcacgaatggcaaacgacgcaagcagcggattcaaacgcgcaggtattgacggcctacgtcaaacaagatggcaaaaccgtctacaaagtgaacctaaccacccaccatggtgttagccacttcacttatcgcgatgccggcggtgattacaacaaaattaaggtaaccgatcatgccattgaggtcactgaagccaattgcttcaatcagattgatgttaagcgtggcaaaatttctaagccaggccaaaccattgtttgcttaccacacaagttactgattgaaattaaagccaaggatgggaccgacacgggcgggatggtttctgcctgatttaaaaggagtacagcgatgactaacgatcaaacgcgtaaatacatctatattgcactcttgtgcgctcaagggattattattggccttgtcgaacgcgcgattccatttccatttgccgtagccccgggtgctaagttgggactagccaatttaattaccatcatttcgttatttaccctaccggtcagcgactgctttttattgatggtgatgcgaactgttttatccgccttgctagggggaaccctctctacttttatgtatagcattgctggggcaacgctaagtttctttggcatggtactcctcaagcaatttagccgccgctttatgagtatgattggcatctcagctgctggtggtctgctctttaatgtcggtcaactctgcgtcgcgagtttcattgcccagagttggcaagtcctcctctatctaccagtgcttgcttttctcggtattctcgccggaattgcggtcggcgtagccgcgaattttttattcgaacatgtcaaaaccctgacttttttaaaagcccaacacgaaatttaatttaacaaggagttaattatggcgaaagtacatgccatgtggcagaactatccagaaatcgaaaccgaacttgcgcaaagtcttgcgctcattgaagacaacattcacaccaaaaatcaagccgtcaccgacgccattttaaagatgattagtgctggcggcaagttgctccgccctgcttactgcttattattttcacagtttaatgcagtcgatcgacagaagatgatcgcattagccgccgctgttgaaacgctacacactgcgacattaattcatgacgacatcgttgataattccaatttacgtcgccatcaagaatcgattcaagcccgtttcggcaaagatgtcgccgtttacgctggcgattacttattcgttgtctgcttcaagttactagccaattatgcgagcgatttgaagagcatccaatttaacagccaaacgatggatcaaattcttgacggtgaactcagtcagatgacaacccgatataatctcgatttaacccccgaacagtacctacaacaaattaacggtaaaaccggccaactgttcgcgctcagttgcttcatcggtgcttacgaaagccaaaaaggcttgaagtttgcccgccaagccgagaaaatcggcttaaatatcggtctcgccttccaaattctggacgatatcttagattacactcagaccgatgtcgattttggcaaaccagttctcgatgacatgcgacgcggcgtctactcgattccgttaatcatggcactgcaatccaatcgccaaacattagcaccctacttggaaaaacaagcagctatgactgatgccgatgtgcacgctgttcaaggcatcgtccgtcaatctggaagtgtcgaaaaagcccaagcactcgcacaagattacacaaaccgcgcactcgctggtcttgcgaaactacccgacatgcccgcaaaaacaacgctacaacaattaactgaacgtttattaaccagaaaagcctaaaaaagacggacaacatgttagaaatgttgtccgccttttattctcgacttaatgctcaaaagttgaccaagcttgaatgcactcattttttaacgtgctcctcgaacagtcttctccggttaactgcaaaaagggcattatggcaagtcccgccataatgcccttttccctgttaatcctcaaagcctacccagttcgagtcacactctttttttaagctgtttatcggatttgaaccgacgacccccaccttaccatggtgatgctctacctactgagctaaaacagcatttcacggttgattaacaaccgtgatataagtatatcgaaaaataaaaagcgggtcaagcccctagagaccaacttctgtatcagaaagtgctaattcaaaatgttgttgtaagaatttagcgaccccgtcattcgtattcgtttctgttacataatttgcagccgctttgacctctggtaaggcattgtccatcgcaacactgtacttcgctgattgcaacattcccaaatcattttgcccatccccaaagacaattgtatgatcggcatcaattccatgaatcatttgaatctggcgaattgcagtggctttatcaatcccggttggaatcatctcgatgttgtctggaccagaagaagacaagctcatcacagcttgatccattaatcgttgtttagcggctgctaaactctctggatgaccgcgaccaatgataatcccgttagtaatctgatcacttaaattcaacaacatttctaaatcagtcaccggttgattatcaatatcggcattcaacaataaattccccgcatcgcgcgcaacaaacttggggatttcttgggtatagtaagctgtgtcagtggtaaaaaagtgcgcagataaattgggatctgctaaacatgcttcgtaagcagctttgagcgcttttttacctaaataatgcttgttcatctgatggccattttcaaagacagcaccgttagaagccacaatccggacatcatcgttaatttgccgcgaaattacccggccaagattgtacattcggccggtggcaatatagaaaatcacatcgcgtttttgtaatgttcgaatcacgcgtttggtcaaaggtgtcacgatttgatggtcaaggaccaacgttccatcaatatctgaaaaaactaagtaaggttccatatgaattcccctcaattttgatttgtaaccggtaacacttcttcgttttagcgtatttagatggggaattaaatagccaatttcgtttcattcacaatcaaacgattaatttatagcagtaagtcttgctatttaccatgacatagtttattatcaccttatttggtaattttaataatgtctgaaggagtttttggctatggataaagaaaatctcaatatcggtgatttagtaaccggcaaagtgaacgaagacctagatggtgcatttacaggaactgttgaaaaagtatatgaaaactccgctttaattagcattacggatttcgatgcagccgacaaggccaacgtttcggaattaaacaacaagatcgttgttaacctcaagcaattaaaagctgctaaagcaaaataaaatagaaaaaagcccaccgacatttatttaccggtgggcttttttctatgctttaatttcgctgacttgtaaagaagcattcaataactgttcagcaacgagcgccaattgctgggcgtcaaacgctggtttaaacaatgcagtgtgcaaaacaccgattagaccccaacaacaataattcaaaatataatcagcgttttccggctgctgaaatggaatcacccgcttgccgtgagtcacggtcaacgcaactaatttattcattaactgtgaatcgggattacgacacaatacccgtaacatagactcgttgtcttgcacatatgacaagacccatctaaagaaagtttggccaacaatctgtggttcagaaggcaactcaaaacgttctagcaactggctgaactcatttaaggtaaaatcttctgtctggcttaaaagatcgtagatatccgtataatgcaaataaaacgtccgccgattaatatcagcccggtcggcaatcatctgaattgtaatctcattaattgggtgttttagcaggagctcaataaaacttgtgcgaattaacttatgtgtccgtttaacccgtctgtcttgcagattaaccatctttcagcctccatttacatcacaattgactaacttgtgtgcattataacacagaaacacttagattgattattgttgaatcaactaaccatcgttatagtagccttaataacaagtcatcggaggtcggcatatgtttctaacaatccaagaattacgccataataagttaaaatttggcgcactgagttttatcatctttttaatcgttttcctagtactcttcatcaccggactagctgccggtttagcaaacgatagtggcgcggctattaaaaatacgccggcgacgcattttgttttacaagccggttcggaaagtcggttgagtcgctcggcactcacccaatctgattggcaagctctcaaacaccaatcactgacacccatcaacgtcacccaagccaccatcgagcggcctaaaaaacaaacaaaaactgatattgcctacattgcagttgacgctacgagcttcatgacacccaaagtcacccaaggtcaaaagctgtccaaccaagccactcaaaaagtggtggtcagcagcaaattacaagccaatggttaccaattaggcgacaccgttaaagatagtaccactggtcagcaatttaaaatcggtggctttagcaagcagatggcttatgcccatacgcctgttatttatttaaaccaccaccagtggcaaaccatttttccaacgcaaaagacgacctataacgcgtttgctagcaaaccgcccttgtcggttaacaagcactaccaagtgatcagcaaacaaaccttgattgataacatccctggctactctgcagaacaaagttcattgtacttgatgatcggctttttatacgtcatctcactgtttgtcctcgcaattttcttttatatcattaccctacagaaattacgggactttggggccttaaaagcattgggcacaaccacacgctatctcagccagcacatcatctctgagattggcttgttaacggcagtggcgattcttttggctggcggtatcattagtgtcatcgcccagtcaatgcctgccagcatgccgtttatgctcacagcaccaacgatcatcggcaccagcgttctatttttagccgtcgccatcctaagcgccctattatcccttattcaggtgattcggattgacccgatcacagctattggaggtcattaatatgtcagcaccgattttaacactcgaacacatcaccaaagattatcccgatggtgatcaaattaatcacattttaaaagatgtctccttcacgattcagccaggtgaatttagcgccatcgttggtcccagcggtgttggtaaaagtactttgttgacgattatgggcgcgctcttgcaacccacagccggtcgtgttaccttggccggtcaagaacttgcaacactcaatcgtaatcgtcaaacacaaatccgccgcgaatcaattggttttatttttcagaattcagaattaattccctatctaacggtcactcagcagctgacttttttacaaaaaatcgcccgtcatcgcgatcaacccgccgctgaacaattactgacacaacttggattaggccatcgattacacagttatcccgccatgctttctggtggtgaacagcagcgggttgccattgctcgggcacttatcaatcaacctgcactcattttagcagacgaaccaaccgccagtttagatgcgcaacgtggtcgtgaaattgtccacttaattcgcgatgcagttcatgaacaaaaacgcgcagctgtcatggtaacacatgacgaacgggttttagatctcgtcgatcacgtttggcgtatcgaagacggtcaactccgccaaaccacataaaaaaaacggtcctttcacaacttagcgttgttgaaaggaccgttttttagttccagaggatagctactattattcgacgttttcaaatttaccccacaagttcattgtggattgaatattaacaaaggcattcggatcggcatccttaacgacccgttttaattccgttagatcgtattttgaaacaactgtcatgatcactgttgtttcttggttggtatacagaccagttccatctaattcagtcgcaccatgaataaagtcacgcattcgcttcttcaattcttcaggtcgcttggtaaaaatcgtcacagtcaccttttgttgttgaatatagatataatccatcaacaagcttgaaacaaagatttcgacgatactgtataaggcagcaccccaaccaaagaagatgcccgctgcaagaatgatcattccgttgatgatattattcacaacaccaacccgtttgccagttaagcgcccaactaacgtcacaatgacgtccgtgccaccagttgaaaaacccgctttaaaacacaagccaacccctaaaccaatcaatgcacccccgaacaaggcacctgcaaatcgttcggtgacaattgggtgaacaggtactggaatgaccttcaagaaaaggacactcgtaaaaacagcgacgatactaaaaatcgcgtactgatgattaatcttgaaccatgccagaatcaataatggcacattcaaaataaagaccaacatcgcaacacttaatgagccgcccatatagctgactaacgaggttagtaattgggcaatccccgtgaccccactcgaatacgtcttcgccggaatcaagaacagattaacactcaccgccgccaaaaaaccgtataccatcgcgataataatttttttcgaatttccttttaaagcaatcactgtagcacctccatcgattaaaaaagccacactccccccttggaagagtgtgacaaatgattaaagtgcgcacttggctataggttcttatccatgacgaaggtcaacttagaaagttgcgttccttctgtcaccaattgcgctaacaaatcggttgttgcttcatggtaatgtgcagcaatttcatgattttgctgggttaagaaatcagtggcattcgcttccgcctttacagcagcatccaccgtagcaatcttagttcttgcccattctgataatgctttttggtagtcaatatcagctttcttaaaggccccgtagtgtgattcaacaatcattgctaatgcttcatataaccagtaagcgttcttcaactgcatcttcgctggtagttcgcgataactttcatccgtatccatcgcattcgtaaagaatggtacgtgtggacagaatgttggtacccccaaacctaaccattgaacaccacgcacagcatctggcacattgtttctaatctgacagatatgtgagttttgcgtccgtgaaagtgaaattgaccgataaatcgtcttttgttcttctgtcccattaccaagtggatcgtaaatagtttcgttataatgtgattttaacacatattgaacatcttccacacttattttacggttagccttgcgaatgaaaggcaagtcactcgattcaggttcttgtttgatttcagggttcaaatagcgttgtgcataccaaacccgtggtgtgttatagtgacgatctaattcagtatccgtcccaaaaatcttacggaagttccattcagcttcactcggattcaagtgattttcactgacgaattcttgaataccttctgaccacatgtaattttctggatcattaaagtcgacatcttcgatggcaatttggttagcggcaactgcataacaatcatccggaatccgaacagcaacccagtgatgcccagtaacaatttcttgataccaaacttcattttgatcactgtattgaacgccattgccttcagctgaaccgtatttagcaatcaaatcccccatcaattgaaccccttgacgtgcagaatcgatgtatggcagaaccaacgtacacattgaatcttcagctaaaccttgcttgaccaacggatcataagctaatacccgttcgttggcataaacactttcagttgcggagagggcgacatttttttcattaatcccgtcttcttcatttaaaccatcacttaaatcgccgttgggggttgatgtgtaacgataaccgtccgtcggtaacggcatggttaagccgttatattttgaaacatatgtctcatgtcgatcatgaactgctggttgtacgaagaaccgtttaggatggattgcatagaagcgatcctcatttcgcgaaatcatcgtagagccatcaattgacgcattcttccctaccatcattgaagtacatgctgataattcgattctgtctgtcatttggaaggaaaaacgaaatcgggatttaaattttcaatctcaaaagagcagttagaaaattatgaactgcttgaagcgcttagcgagcttgaagatgatgcaatggccttgcccagagtaattaaattacttttgggtgatgatggtgctaagcggttgaaaaaccatgtgcgaaaacttgatggcattgtgccacccgaagcgatggcggatgaaatcaaagagattttacagagtcaaaaacaaacaaaaaactaatgatccttgccaagatgattaagctggacgaagatgccttaatcagtgatctcgctgaaacctaccaaatatacgactatcagcagctaccgttatcaacggtggctgctttttcgtgtaacttgcgcaatgattcacgcatcaaattgaagatgaaccagcaagcagtgccagtcaatacgcaagtgctcatggggattctagatgctgtgaacctgttgttgtggtcgcggtctaaagatgctgagcgcggtgccaaaaggccgcaatcaatcctagatgccgttatgggcaatcagaaaaagcaatctgcagattcggcagtcacttttgattctggcgaggatttcgaacgaattagaaacagattaatcataggaggtggaccaaatggcgactgagcttggacaagcatacgttcaaattgtgccatcagccaaaggccttagcggtgccatcaaagggcagttagatcctgaggcggattcagcgggtaagagtgccggctccaaaattggcaccggcattaagcttgccgcaatcgcaggtgtggccgccgttggtgccacacttgggaaaattatctcgtcatcattgtcggaaggtgccgacctccaacaatcgcttggtgggattgagacgctgtttaagggcagtgctgataaggtaaaaggctttgccaatgaagcgtacaagacagccggtttatctgcgaatgcctacatggaaaacgtgacgagctttagtgccagcttgctccaatcggttggcggtgacaccgaaaaggcggccgacattggtaacatggccatgattgacatgtccgacaatgccaacaagatggggacgagtatcggcgacattcaacacgcctaccaaggctttgctaaacagaactacaccatgcttgacaacttgaagcttggttatggcgggactaaggaagaaatgcaacggctcttaaccgatgcgcaaaaaatctccgggcagaaatacgacatgagcaatttagccgacgtttacaacgctatccatgttgtgcaaggcgaattggacattacaggcacaaccgccaaggaagccgccagcacgtttagtggttcgtttgaatcgatgaaggcttcactgtccaatgtacttggtaagttgtcactgggtcaagatattgggccatcgctacaagctttggcagaaacaacatcaacattcttgttcaacaacttcattccaatggtcggtaacattttaaaggcgctacctggcgcaatcacgacattcattgcggatgccgccccgagttttatggcgggtgggcaacagttgatcagtggattaacgcaaggcatggcgggtggcccgagtgctgtcacagcgtcattgggtggcattatgtcaacggtaacgcaattcggttcaacagttaaaacagcattgcaatcaatcttccaatcaattgggccggttatctcaagtacgttgggtacaatctttacacaactgccagcactattcacaaccgttgtaggtgcgattacaccaattgtagaaatgattggtgacgcatttaccaaacttgacttcagtggcttgcaaaacttagtgtcggcgattgtgccagctgttactgccggctttagcacaatgatgggcgttatcggtccagcgatttcaaatgtaatcacgtcgtttgtcggattgtggaatgcagcccaaccactcatttcagtattagccagtgcactaatgccagcacttcaaatagtgggcgcctttttaggcggggtgttcaaaagcatcttgtcgagtatttcaatcgcattcgatgccattcgaattgcaatcggatttttaacgccggttattcaagttctggtcgccgccttcaactttattgcgccggtattaacgactgtagccagttggattggtcaacttgtcggattattcggcaatctgggtggtgtcagcaccaccttgagagctattatctccgatagctttaacgggattaaatcagctatttcggtcgctggtagtggtatctcagccacaattgaaatcattaagggtgtttggacatcactgagagcggcaggctccgcacttgggtcaatgttgtctgcaatatggtctgggattaagtcctcagtgtcgattgctggcggtgggattagtggtgcagtaagtggcattcgagccgcttggagtggattgcaagcagccgggtcagcgcttagagccgcgatttcaggtgtttgggctggcattactggtgcagttcgtgtggcacagacaactatttcaggcatcgtaggtagcatcaagtcaatcttcggtagtctcggtaacattaatttaagcagcgccggacacgccatcatgaatggatttcttggcggattacaggcgtcatttgaaaaggtcaaaggattcgttagcggtattgctggttggattaaggagcataaaggtccaattagttacgatgcaaagttgttagtcccagccgggagtgcaatcatgggcggattaaataagagtttgcaagatgcatttcgtgcggttcaatcaaccgtttcaggtatggccgacaagttgagcctatcaatgacgcccgccattgcatttgacgaaccggccgctttgactggcaacaacctcgcgcagatgatgcgcccaacgccaacggtttacaacacctattcagcaccaacccaagacgtagccaacagcgcggaaatgcttgacttactccgcatcattgccgataaacgtactgtagtcgatggttcgtcattttctccagcgtatgaagaatacgggtcgacagaacgagcacgtcgtaatcaactaaaagcaaggggagttgcaattgacaataaaatctaagtattcatacgggattgaattcaatgggcacagatccaacgactttggtttggacgtgcaagccaaaacggtggggatgcccgccaagaataaaatcacgcaggcaatcccgtttagcaacaccgtcttggatatcagtgatctatacggtggccagacgtataaggagcgcaccatgaaaatcacgtttattgtgcgtgatggagaagaccaatccaaagagcgtctatattcgttatggacgcaggtcgttaattggttgatggcaccggcgcaaaaagtgaagctgaaagacgacatcatgcacaactattattacctgggcgaggtgcagaaagaaccctcatgggatgagatgcgcgcctatggtaaattgtcggttgaatttacgtgttacccgttccgcatcgatgaactggcggaaggcaacgacatttgggacgaattcaacttcgaaacggatatcgcgcagaatactgagtttgatatcgtcggtaaacgcaccattacgctgtttaacatcggagccacgtctatctcgcccgaactgatcgccagtgcgccgttcacgattgaagtaggcggacaacgatttacgcttaacgctggcacgtcaagcagtccggattttatgttgccaaccggtgagattaccatcaccgtgattggcacgggtaaactagcatttaattggcataaggagttgatctaatatgtatcgggtgacggtaagagatggctgggacggcacggagcacacaatccattcggagaacctgaacgacaccaagcttttaacggctaagattatgcgggacatcgatgcaattgattcgtttcaatttagcattagcccagagtcaccctattacaacgactttaaagggatgacgacgttcgtcaaagtgacgattcccaagcgcaatcaggtgctatttgaagggcgtgtgctcccaacaaccgattcgatggcgactagtggcgagtttaacaaggaaattacctgtgaaggcttgctggcgtttctacatgattcaacgcaggactattacgcgctagcaaacaacgacttgaagtcgttcttgcaacacatgattgatgtgcataaccgtcaagttgatgcgtttaaaaaaatcaagctggggcaagttacagtgactagcccgtctgataatgtctacaagtcgattgatgactcaaagacgacctacgagaccattaaagataagctgatcacgaagtacggtggtgagattcgactgcgccacgaaccggacgggttgtacctcgactacatgcccgagattgccattcaaagcaatcaagagattcgattagcgagcaatctgctgtccatcaaaaggtcgattgatcccagcgctatgtattcgattatcaagcccctaggtgcaagggctgaaacgacgacgcaagccaatgagggagattccgaaatatcacaaccaagattaacgattgagactgtcaatgctggcagtccttttttagtctcgcaaaagttggttgatcagattggccgtgttgtgcatccagaggtttgggacgatgtgaaagttacgtcaatcctgaaatcaaaagggcaagccatgctggacagtcaacggctgatcaaagagcagttccaagtgagcgcggttgacctcagtcttttaacagataagaccattgatacgtttgaagcgggtaattaccatcgcacaattaatcctttgatgggcattaatgagcgcttgcggattgtcggccagtcgctggatttgtgtaacccactcagctcaacactctcaatcggcgacaagctgctaagtcaggaagactacgagtcggcaattaagttgaaaaacgaggtcgctattcaagagatgaaagtcaaggtggcacttcaatccaccaaagtcaccgccatcaccaccgaacttgccacaacgaccgagaatctaaccaggcttcaaaccgagtacgacaagttaattgagaacatcggtgatgcggatttcaaagcaatcatagccaaattgaccaagctagagaatcaaacgactacaatcattaccaccctcggtgagattggtcaaaacgtgcttgatttagaggaatttaaaacaaatcaagaaacgctaaatacaaaacaagaaactgccaatgaagattttgaaaagcgcataactgcgttagaaggaggtaataaatagtggcagatgaaatcaaaagagatacagtagattatcgtgatccaacgccgttcgataattcaaaattgcaatcactaagtgaaatcagtaaagcgatgcgccacaaaacttatggcgaagatacccgggaagcgatggcccagcaaggggaagcattggttaaaattatgcaagaaacgggcggcaatcaatcagcagaagtcgtagcagctcgtagcaattttgagttgctcggcattcgcgaagacgcgcaggacaatgctattgctgttattaatgccaataaagctgataaaacggaaatcgcagctttaaaatctgaaacagatgcaaaattatccgtaaagcgtaacacggctactaagattaaacgagcagatatggacaccagcaacgacggcgctaaactagggttaattaatctttcagaagaggttcaagctgcaatggctggaaaagcaccggttatcggaagcgttgaaaatggatcaataacggaacaaaaaatcgctgcaggagcgatcacgggggataaactagtgcaaagcgtcctatccggctacagcttgattgttggcggagagattcccaattatgaccaatcgacgagaacgttcacgtttggcgatagccctaagctagcgctaattgcttggggaagtattcacagatttcaaatcccaaaagggcttaaaatcattaacacgccagaaaacgactacacggcgacgaggctcatgtttaatacagaatcgttgtcgtttagatttatctcttgggataataattatgaaccagccgaaatttgtataatgagtgttcgcgcagattggggggtgaactaggaaaaccactcattagcgccaatttcccggttttaattaacggagattatcctagtgatcacgaccgttgggctaagattgttccttcgccgacctttaaaccggactataacgactcaacccatgtttttgattttaattctcaaaaacgccttacgcttaaaaattcatacgagcctaaagtctttttgttgttaaaagactcaaaaggcgtggttatggaagataacgtaacggttattaatacagtggcagaaagcggtgcttcaacatatgccagacttatttattcagagagcgacaatagttttaaattccaaagaatcgacgctcctttaaaatttaacgactatacaattgcgatcatcagagataattctactgacaaaaatgcttcaacgagacaggcgatcataacttccccgtcagaaataacgattaacggtcttcctaattcaacttatgaagaagatacgtatgcaaatgtgattgcgattaaccataggggggcaagcgattttgcgccagaaaatactatgccggcgtttaagatgtcaaaaaaactagggttcaaatatgtggaaaccgatattcacttcacatcagataatattccagtgttaatccacgatgaaacaatcaataggactgcggttaatgatgacgggacagcgatcactgacacgattaaggtggcagacaatactcttgcgacgttaaacatgtatgattattcattaatcgaaaaaagacgtgtggacgcttatattggcacgaaaatggcgactttggaagacctacttaaatacggcaaacgagcaaacctaaaactagtgcttgaacttaaaatcgacttaagcgacgcacaaatcgacactgtgatggggctggtctggaaatatggcatgcaacgtaatattatttggcaaagctttgaagcgtcgcgctttaatcatttaaaagcactagatccaaaggcaaaactggcctttttatttggcaaagaaacaaccgctgatgataacctagccaagatgttaccttatagaaatgatacgaacgaaattatagctagtgttcaagcgggatcaaatcgagacgatttttataaatactcaaaaaatgatattagggtttttgtgtggacattttatgcagacggcgcggtgttggattggggagttaacaccgcagtaagcggtattatgacgcaaggagatattcagcaaggttatattctttctagacaataaaaaaagccctaatagggcttagtctaaatcacgaatcctttttgctggagtcccaacgtaaacgccattaggggtagttgatttggtcacagtggcattagctccgataacgcaacccttagcaattgtaacaccgggcataatggttgcattaaggccaatccagctgccatcttcaataataattggggcttctttgtggattccagccctttgttcagcagttccgatattgtggccgacacacaataatttaacttttggccctaaaaaaacgtggtccccaattgttataccggttccgggatagtttcgagtgtagatatacagatcatgattaataaaagcgtgactaccaattgtaatattatcagtgtcaatataatcaggctggcaaatataggcgccagttccaactttaatccccaatattttgagtacaaaatgaagtgcttcataatagttagacaagaaatctaacagttatggagctctttttatatggtcaaatacagttctagtttaaaagctaagatagttggtgagtatcttcaaggaaatattagtgccaaaggaattgccgaaaaatactatttgcctagaagacaagttgctcattggattcaaagatatcgtttaagcggtgtagattcgcttaaacgtagaaatgttaaacgagaattttctgccgagtttaaattagatgtgatagactactatcaaactcatgacgagtcacaaagtgaggtagccgctaaattcgatcttataccatgtcaaattagtatttggcgcactacttttaatcgagaaggtatattaggtttgaagcctcgtccgaaaggtagaccgaccaaaatgaaacgaaataaaaagcaattacgtcaattagtaaacaaaagtgaagtagaacgtctacgagaggaactcgcagaaaaaaacaaggaactttatgacactaaattggaacgtgatatcctaaaaaaatcagtgaccctgttcggaccctcaaagggaaacgaaaaacacaaatagtagatcagatcagggctgaccaagacgaattatctaaatccgatagatataaaataggtgatattcttaatgccataggcattaagaaggctacttatcatgacgagcgtaaaaggcttaaaaattatcaagacaagtatgcggatgtgaaaaaagaaatcattaagattactgaagatggaaaatttcgaggccggctaacctacggttatcgccgagtacaaaaagaacttttaaagttaaatatccatttgtctgacactgttattcgtcgtctaatggatgaattaaacgttcaagtatctatgtataatcgtcataagaatggcaaatactcttcatataaaggcaatgttggaagaatctcagacaacatcttgaaacaaacttttaatgagacattgccctacaaagtactacatacggacgtaacacaagtccgattgaaagataatagttgggcgtatatttctgctattacggatgaggctagtaaagaggttttagcatttaaaataaatgatagtcctaatagtagcttgataatatcaactctgaacgagttgattatcaagctacctgaatctgtgcaaccaataattcattctgatcaaggatggcattatcaattaaattactacactgaaaaacttaaaaataataatttcattcaaagtatgtcacgtaaaggaaattgtcacgacaatgccccaatcgaaagtttttttcatctttataaaacagaatgtttaaatggattcccaccttgcaaggatatttctgagctcacacaactttctaaagaatacgtcgaatggtttaatcatcgacgcatttctttgaaaacaaaaaatatgtccccggcagaataccgagaacatacattagttgcttaaaattttaattttgtctaacttttctgttgcacttcaaaaagcatagatttttcaggtgttttgtttaaaagatgtctaataaacattagctttaaccttttcatagcatcgcctccaaagcataattatatcacgatattaggccgctagctgcaaatatgagcaaataaggaagggatagaacgcatcgcatccgaatgatgaaggttatcggaaatttgctgaaaaatcgctaaatttttttctaacaattaagcaatcccattatggattgctatttttattgcatttaaattaatactgtaggaggaataacatggtttgagtaatgagaaagaagatttaaacgtgacagagatgctcattgacatccgtgagcgcctagtacgcgtcgaaacaaatactaggcatctagattcgaccgcaaccaaagttgaaaaggcttatagtattgccaaagaaaatcaaaaagatattggagacttaaatgagagatctaaatggactcaacggacagccattacagccatcttgattccaataggtctttttttatttgaaaaattaataggagggtaattaatgattaaaaaagtagattggcattcaaaggtgttgtggacttcgctgacagctctagtcattgtgttagttcagcaagtggccaaagttttcggaattgaattcagcaacgatttagctagccaagtacaaggcatcgttaatacggtgcttacaatcttaggcttaattggtgtcgtctatgacaccacgaagggagattcaaaatgaaaaaatcaatgaaactagtagtcgccacgatgacggctattttatttgcccaggcatcaactgggttagcgcaagcctctaaaggtgaccagggtgtcgattgggccgtttatcaaggtcaatttggcaaattcggatacgggtcagacaagtttgcgattgctcaaattggtgggcacaacgccaatggcctctatgaacagtggacttataagacgcaagtccaatccgccatcgctcagggtaagcgggcgcatagctatttttggtgggaaaacatccataatcgcgccaccgctgatcagactttaaattatgtcttaagcaaaatgcaaacgccaaaaggttcaatccttgcaattgacttagaacagggcgcgtcaacgtacgctgttaataccgatttagttatgtacgccatgcaacggattaaaaatgcgggttacacaccaatgttatacggtggccgtgattatttgcaaaaccatttaaacgttgatcaagttattgccaagtttggcgacaagctatggttagccgaatatcctaactacgcggtgacgccgaaacctaattacaactttttcccatcacgaactggtatcgccattttccaatttacatcaacgtatatcgcaggcggtctagacggtaacattgatttaacgggcattaccgacaatggttacacgaaacatgataatccggtgactgaaacaccggccaccgatgcgggtcaagaggcggacgacactgccaagaaagaaatcaaagtcggtaatacggtcaaggttaacttctcagcgcaacgttgggcgactggcgaatcaatcccaacctttatcaaaggtcaatcctacaaggtgcttcaagtcagtggcaaccgcgtgctattaaacggcgtcatgagctgggccaacaaaaaagacgttgaaattatcagcaccaacactggtaacacaacgtccggttcaacttatacagtccaatcaggtgacagctggtggtcaatcgccaaccgtcatggcatgagtatgtataatctggccgcattaaacggcaagacaatttatacaatgctatatccgggccaaacaattaaggtgtctggtgcagcatcaactaaccgcacatacacagtccgatacggcgactcattctggttaatcgccaacaagctaggagtcaatatgtacacactagcagctaaaaacggcaagagcatcaactcgatgatctatcccggtcaaacattaacatattaaaaaaagccctcgttatgagggcatacatattaattagtgaacctattaatcaaaaatggtacaagttttagttttgctttaatccggtatctatcgtttacttggtatttaccattaaaagccatagaaactgttgacttaccagtatcagtttcaagtttaagttgatactcagggatggcatctgtttcgaagtaagtaattttataagatgtcccaggttcaatagtcaccggttttatagatttaactggcttataacttccagtaggaataggtgagggattatatttctcaatcgttagtttcacaggtgtcgtttctggcgatatgtacagaactttatttgcatcttctgtcccatttagggtgatatcatcagaaatattcttatacaagggggctgtattgattggatagtgatttatgcttatatcttcatagtaggtgtagtttttaaaaaatgaaatccatagtattaaaaagaaaaggatcactttaacgataaaagataagaaatctagcgggtctttattatttaagtaccaacgatatggattcatttaatcactccgtgtatagtttattattctattatatcgtaatagttctctataaaaatactagaattgccgatattcaactttaatattgttatcaagtaatttgcgcagcacgttcttatattcctcaacccgctcaaaggcaaccactcccagcccatgactgtaagtagcgccgtccatttcttctagataaaaattataaggttcattaaaccggtctttaacaaccggcaacgagtatgagtgtcgtcatctgatcacctcgcaattattatacaataaacgtttgacaaatacgaatgtatgttcgtataattaaaacgcaaaggagtggttgaaatggaatacattagtttaaaaggcacgatcaacagcaccgttaaagttatcagctttaccccgtatctagtgcggtttgagcttaaaacggatgagcaatcctataactgtctagtcgctaaagatgcgtttaacttcgtttacctagcagaagagaatgcaccaatttcaatttttggccactttaataagcgcaagcaattaatagtcgataaataccatgtcaagaatgtaattcaaaaattatctgttgtaagatgagaacagaacaaaagtgggagcgagtcagatggaacaatttgcaccagcgcggatcaatgagcaatattatttaactctgaatgagactggcaaagttgagctacacaaagagggtattggggtggttggcagtatgagctactattacactcggaatgacttgcccttgtttatctgtcggcatgaacctagcgccaatttaaggacaattcatgatataatggtgcaactagatgaacagatgcaaaagatggttgaatgtggttgcttaatggttggcggtcaaaacgttgcagttcaaagataagctttaacccgtagaaaagagaccgcctaatttaggtggtctctttttgagtatgtaataggaaaagacaattattattgaccacatatggagtacaacaaaaaagacctgccaacataaaattgacaggtctttttacatttaccacacaagaaccacacaaagtgatgataatcgttggtataaaaggtatatctatgcgtcacccgggagtcgaacccggatctcaagaaccggaatcttgggtgctatccattacactagcgacgcattccgcgtactcaacagtacaatatattatattagcggagttaagcggaaatttcaagtgtaaattttgataaatcgcgataaatcaacgtttaaaaaatattcggaaagaaaacgtattcatcaaccccaaagcattgcatctgttttctgcacttgttataatggtcttgttcaaaaggataagttactagttttagtaagttgccttttattttttgccaaccatgggtcgactaatgacacagatggacattttatgtcccacggaaagtaggcgatagcaattgcgcgatgaattatctgcaatagaagcggttgcgccagatttcgtcggtatcattaagaaacgttaccaggtgttacaacatatcgattggctcgcgccagttggccgacgaacgcttgcggaacaactgaagatgagcgagcgagtaattagaactgagacggattttctgaaagcacaaggtttgcttaattcgtctaaatcaggtatggttttaaccgtgaaggggaatgaaaccctcgatcagttaagacaagtaatggatcaattcttagggttacatcagactgaacgtcagttgagtcaagtcttaggcattgaacattgcttgattgtttctggcaatagtgatgaacaaccaaaagtcctcaccgaaatgggcaaattagtcaatagtacgttacaattattattaccacaagggcaaagtattgtggcagtgatgggcggaacgacgatggctgaagcagctcatgaactttcaactgatctatcgaaacagcgcaatctaatctttgtgccagctcgagggggaattggtgaaagtgttgatattcaggccaatgcagtctgtgccgaaatggctaagcagacaggtggtaagcatcgggcattgtatgtgcctgaacaggtgagtgagaagacgtacgcgcctttgttagaagaaccaagtgttcaagaagtgttaaaactgattgaacgaagccggggtgttttacacagtattggtgaagccattgcgatggctgaacgtcgtgagatgccgattgaaaccatcaagatgcttaaagaaaagcatgcggtgggtgaagcctttggctacttcttcaatgcacaaggcgaagtcgtgtacaagattccgcgaatcggattacagattcgtgacttattgaatattccgtgtgtactggcggttgcaagtggtgcttctaaagcccaagcaatccaagcgtacatgcaccttgcacctaaacagacgtggttaatcacggatgaaggtgccgcaaactcgattttacaaggggcaaccctttaaaataaaaaatttttcatttcctaaaggaggaaattctattatgactacaaaagtagggattaatggtttcggacgtattggtcgtttagctttacgtcgtatttacgcaacaaacagtgatgtattggaagttgttgctatcaatgatttaacatcaccagacatgttagcacacttattaaagtatgatacagctcatggtcaattcaaccacgaagtatcagctacagaaaacagcatcgttatcgatggcaagaacattccagtttatgctgaatcagatgcacgtaatattccttgggttaagaatgatggtgttgacttagttcttgaaagtactggtttctacacatcagaagaaaaatcacaagctcatatcgatgctggtgctaaaaaagttcttatctcagctcctgctggtgctgttaagacagttgtttacggtgttaatgatgacacaatcacagctgacgataacatcatctcagcagcttcatgtactacaaactgtttagcacctttagctaaagcagttaacgatgctttcggtatcaaagctggtacaatgacaacaatccatgcttacacagctacacaaaaattacaagatggtcctgatcgtggtggtaacgtacgtgctgcacgtgctgctgctgctaacatcatccctcattcaactggtgctgctaaagctcttggcttagttgttcctgacttgaagggtaaacttgacggccacgcacaacgtgtcccagttatcactggttcattgacagaattagttgcaactcttgacaaagaagttacagctgacgaaatcaacgctgctgttaagaaagttacagaaggcaaccaatcatttggttacaacgatgatcaaatcgtttcatcagatatcattggtacagaattcggttcagtattcgatcctactcaaacacaaatcgttggcggtggcgcaggccaagttgtcaaagttgttgcttggtatgacaacgaatcaggctttactgctcaaatgatccgtacattagaaaaatttgctagcttaatctaatttcacttttgtgaacttaggaatgcgatagcattttataaggcgggaggaggtaaactccttccgcctttttttatgaaaatctaggaggtttgtccacatggcaaaacaaacagttgcagatttaaaagatattaaaggcaaaaaagtcttagtacgtgttgactttaatgtaccaatcaaaggcggcgttatcggtgacgataaccggatcgtagctgctttaccaacaatccaatacatcatcgacaatggtggcaaggcaatcttactttctcacttgggccgtatcaagagtgacgaagataagaaagaattgacattgaaaccagttgctgcacgtcttggcgaattattaaacaaagacgttgctttcgttgcttcaaacgaaggcaaagcattagaagatgcaatcaatgcgatgactgatggtcaagtattggttatggaaaacactcgtttccaagacatcgacaacgactttggcaaacgcgaaagtaaaaacgatcctaagttgggcgaatattgggcatcattaggcgacatgttcgtaaacgacgctttcggtacagctcaccgtgctcacgcatcaaacgttgggattgcaacagctatgaaagctaataacaaacctgcagttgctggttacttattagaaaaagaaatcaaattcttgggcgaagcagttgacgctccagaacgtccatttgttgctatcttaggtggcgcaaaggtttctgacaaaatcggtgttatcgaacatttattagctaaagctgacaaagtcattgtcggtggtggtatgacttatactttctacgctgctaaaggtttatcaattggtaactcattagttgaagaagataagatcgaattggctaaagaattaatcgaaaaagctggcgacaaattagtattgcctgtagataacgttgttgcagacgcattctcaaacgatgctaagacagaaattgttgaaggtaacattcctgatggctacatggcattagatatcggacctaaagcaattgctgacttcgaaaacgtccttaaagatgctaagactgttgtttggaacggccctatgggtgtgtttgaaatggacaactttgctaaagggacattggcaatcggcgaattcttaggtaacttatcaggcgctacaacaatcgtcggtggtggcgattcaacagccgcagttaagaaattaggcgttggcgacaagttaacccatatttctactggtggtggcgcatcacttgaatacctagaaggtaagacattacctggtatcgctgctatttcagacaaataatttaaaattaagaggagattttctcatgcgtaaaccaatcattgctggtaactggaaaatgaacatgaacccaactcaaacaactgagttcgtgaatgctatcaaagccaacttacctaagtttgatcaaacagaatcagttatcggtgcacctgctgttgacttacctgctttattagaagcagctaaaggcacagacttaaaagttgctgctgaaaactgttacttcgaagatgctggtgcattcactggcgaaacttcaccaaaaacattgaatgaaatgggtgttgattatgtcatcatcggtcattcagaacgtcgtgattacttccacgaaactgatgaagatatcaataaaaaagcacacgcaatcttcaaaaacaacatgacacctatcttctgttgtggcgaatcacttgaaacacgtgaagctggcaaagctgaagaatgggtttcaaaccaagtaacagaaggtcttaaaggcctttcagctgaccaagttagctcaatggtcattgcttacgaaccaatctgggcaatcggtactggtaaaactgcttctgctgaccaagcacaagaaatctgtgctgttgttcgtcaaacagttgctaagttatacgaccaaacagttgctgacaaagttcgtatccaatacggtggttcagttaaacctgcaaatgttaaagaaatcatgggcaaagaagacatcgacggtggtttagttggtggcgcaagtatggaacctgcttcattcttagacttagttcactttaacgactaatttttaacgcattcctgtttacgaatggcgtaaaattagctaaaatagatgtaggctttgcctgacatccaaaaaagcgctaatgcttagcattagccaaaaaaggagaaaattacatgtcaattattactgatattttaggtcgcgaagttttagactcacgtggcaatcctactgtcgaagttgaagtttacacagaagatggcggctttggtcgcgcaatcgttccttcaggtgcttcaactggtgaacatgaagctgttgaattacgtgacggcgacaaatcacgttttggtggcaaaggtgttttaaaagctgttgaaaacgttaatggtcctcttgcaaaagaaatcattggtttcgacgctacagatcaacgcggtatcgatgctgctatgattcaattagatggtacagaaaacaaaggtaaattaggcgctaacgcaatcttaggtatttcattagctgctgcacgtgctgctgctgacgaattaggcttaccattgtacgaatatcttggcggccctaacgctcacgtattaccaacaccaatgatgaacgttatcaacggtggtgctcactcagataacaaagttgatttccaagaattcatgattatgcctgttggtgctaaatctgtacgcgaagctatccgtatgggttcagaaactttccaagcattgaagagtcttttatcagctgacggtaaagttacttctgttggtgatgaaggtggtttcgcacctgacttcgcaaacaacgaagaacctttacaatacttgatcaaagctattgaaaaagctggttacaaaccaggcgaagatatttcaatcgctatcgacgttgcttcatcagaattatggaacaacgaagacaagacatacaaattacgttggtcaactggggaagaattcacaacacctgaattcgttaaataccttgaaggcttagttgctaaatacccaatcatttcaatcgaagatcctatcgatgaaaacaactgggaagactgggcatcaatcactaaagaacttggcgaaaaagttcaacttgttggtgatgacttcttcgtaacaaacactgattacctacgtaagggtatcaagatgggcgctgctaactcaattcttgttaaagttaaccaaatcggtacattaacagaatcattagaagcaatcgaaatggctaaagaagctggctacacagctgttgtttcacatcgttcaggtgaaactgaagatacaacaatcgctgacttagttgttgctacaaacgctggccaaatcaagacaggttcaatgagccgtactgatcgtttagctaagtacaaccaattaatgcgtattgaagaacaattaggcgatacagcttcatacaaaggtatcaactcattctacaatatcaaaaaataattgaatatgttcgtgtcggcacattttgaggtttaacagccggcgttaaaggattatgtttgtagtcttttgacttagggggttaccattgaatatggcgagcaaaacatatctagtaagagcatcttttaattaagatgctctttttttgtgcgataaattgaccggataaggtaatggattggattaggctagcaactaaataaacaatccccagcataaccggttgattaagaaaagcttatggagcattgcgcaataattaccagaataatcttgcaaataattacgtttgcaagcggatacataaacattagactatagatagcgtagagggattgaaacgaggagttgcgataagcatgaacaaacgagaacacgctattattcaatatagtttggcccagcataaaacgtactatgtcgacattgccgcacagttacagctttcagagcgcaccattgcaaccaccttgaatgatatcgaaagagccctttaatgtgaaactcgttcgaaaaccgaatgacggtatttattttaccggggatgtcgcgacattagccaatcatcttgaaaaaaaggccaatgatcgtccccaatccaaggaagaacgctgtcattgcattctggctaaattattattaggttcagcatcgattacgattcaacaactttctaataccctatacgtgagtcggagtacagtcgagaatgatttgaaaaaggtaaagcaaaaactcgcgcaattcggtcttcaattggcaatcacgcataccggtttatccttaatcggttctgagcatcaaaagcggcaagcaacggtggagttaatcagtcagtattggggaaaacggactgaggctaaagagttaaatggacagttagtgcgccatgttcaattaccggataatctgaatcaactgtttgaaccagccttgattaaaaacatactcacagctttaacggaattaattgaaaaaagtacgctatcatttactgattacgagtttcagttgttagcgattcatctgatgatgccagcaccaactggtggaagcaatggagcccaaccagtggtgacaccgttcattgccgaaacacagctgttagtacagattttagaacggcgatttgaattgacaattccggattttgaacaggaatatctcaaccgtcatttagtaacggtccaatcgaaggatacatctgttcaaactatccagaccgagttgcggcaatcagtcgggctgccacaactattacggcaacagcttgctcaattagcagttgatgaggaattaattcaggggttagcagttcatttaagttcggcacttcgccggcttgcaatgggattgagtattaataacccatatactgatgaaatttgccagaattttccgcaagcctttgatcaagcagtgttactaaagccggtgcttgaaaatcagtatcagattcaaatgaatgaggacgaattagcctttattagtttacactttgaagctttttttgaacgacattcagaagatgcacgcttgagtgttgtggtggtttgtagtagtggcattgggacatcgcaattattagggcaacggttggccaaaacgtttgctcaagaattacggattactcgtattattgccttgggagaactacttgcaaccccgattaaggaatcgctagtcatcagtacgattgcgattaaaggtttgtcagtgccggtgattgaagtcagtcctttgttaaatcggcatgatattggaatcattcgccagatgattactgaacaaccgacgcctaccaatcacttagtagctttattgcaacccgaactgacaattgtcacgcaagagcagttaacggatcaaggcgcaattgaattaattggtcagcggctcattgatcaagggtatgcaaagccaacggttgtccaggcagcgctggcccgagaagctttagcaagtacggcacttggtcgagtagctttgccgcatgcggattcacaattaattaccaagccagccattgggttgctgattgcaccccaaagtattaattggcaacacaacgacaaagtgcagctcgtcttctttatggccttgaacgaaactgttcatggccaaatgcgggcgatttatcatgatttagaccaattgattgaaaccccccgtcttttaaagcaagtcgcacaagcatctgatgggacggctgccctcgccatcttggcacaattgaatcagaaaaattagaatggagtgttaccagatgaaagaatttgatgttgaaaatatttttacagatatcgttgttggggatgataaaccgacggcattagcaacactagcgcaattatttgctgataagaatgggttagatcgggttgcattaaccgcgggattcaatgcgcgtgaagctgagagcacaactggttttgggaatggggtggcgattccacacgcgaaagtggcgggattaactcaaccagttgtcggaattgtcacgtttgaaactggtgttgattgggaagcattagatgacgcaccagttgaaatcgcgattgccctaattatgccgctcgatgaccctaataagacgcatttaaaagtgttgtcgaagtttgcgcgcaagttgatggatgacgcttttattcataatttgaagcaaaatcggcatgatgcaatggcactctacacgttagttaacgatgaaatcgaatttaactaggaggatttagaagatgaaaaagtttgttgggattacaaaatgtccagttgggattgcccatacttatatggcagctgaaaaactgcaaaaagccgggcaagctcgcggatatgaagttaagattgaaacacaaggcgcttcaggggtagaggatgaattaagcgccgcagatgtggctgatgccgatttcgtgattattgccgctgacgttgccgttgatggggaagaacggtttaatggcaagccagtactatatgcgaagaccgctgaagctattaaagattctgatacactgattgaaaaagcactaacggcaggtatttatggcaagaatcagccgaaaacagaagctaaacaagaggacagtcatgaacaaagtccaattattaagcaattattaaatggggtttcccatatgattccgtttgtcgttgtcggtgggttgtttattgccttgtcaatcgcgattggtgggcatccgactaaagcaggaatggtgattccaccacataccatttggagtagtatgaatcagattgggacgattggttttaccttaatgattccaattctcactggttatatcgcttatgctatttcggggcgtgcagctttagcacccgcaatgattggtgcaatggtcgccaacaatacagacatccttggtacaaaagccgggactggatttattggtgcgattatcgttggttttgcggctggttacttggttaaatggtttaattcatggcccgtaccaaaagatttacggccagtgatgccaatttttgtcattccgttattaggggttgggattatctcagccgttttaattctcgttttaggcgcacctatttcatggttgatgacggcactacaagatatgttaacgaccctttcacaaaatccagaaacgagtgtgattcttggcgttgtgattggtgcgatggtcgcgattgatatgggtggcccagttaataaagtggccttcttattcggggtggcatcgattacggctggacatccacaaatcatgggtgctgttgcttgtgccgttgctgttccaccattggcattggggattgcaacatttgttcgtcgcgatctttatacagaagaagaaaaatcagctgggattccagctatcttaatgggcttgattgggattactgaaggcgccattccatttgcaacagctaacccaaaacaagttttcccaagtatcattgctggttcagcagttgctagtgcagtcgggatggtcttcaaaatcaccgatgcagtgccacatggtggcccaatcgttggggtgttaggtgcaaccaataatattggtttgttcttcctctcaattttggcaggggttgctgttgcggtcgcaattttaaccacatttaaggtacgaaaagcacggaaagcttaatcttaaaagggcacacgagtaatcggcgctctttttttgtgggtaaaaaagttatgaacatgcgcttttttgaattatataaagcgctgtctatcgaattttgataaaaactggtataatagagccaattaaggtaaaaaggggtggcagtcgtgaaaaaaggagatcgccaagcacgaatcgaacaaatcattaatcagcaagttgtttcgacgcaagaggatttattagcaacgttgaaacaagatgggattgatgcaacgcaagcgaccatttcacgtgatattcgggagatgcaaatcgttaaggcacgggatgtgaacggtgagctccgctatacgatttttcacgatgacgaacgcacccaaactcagaaattaaaagataaactgcgtgaagtggctttgtccattacacaagtgcaaatgttaaacgtaattaagacgctcccaagtaacgggaatttattagcagccttaatcgatgatttggggtacccagaagttgtcgggacgctggcgggtcacgatacgattgttatcattagccctagtgaggaactagcagccgaattaaacgaacgtttcgcacaacatctagcaacagcgagataagcaaacaaataagacgttgcgacaaaagtaattttttgtcgcaacgccttattttgttgagctaaacatgttctgtgttaatcctcaggagatatccggctgataactcactctttaatctacatactggttaaaaatgtctgggatgggggctgttactgttctttgttcatccgtgaagggctctgtgtagcgcaacgtttgcccgtggagtagtaggcgctgtgttgaatcggttggaaagtacaacggatcacccaaaatgggatgaccatcagccgccaggtgcaagcgaatttgatgtgttcgccctgtttcgaggttgactgccaaggttgctgcaggtccttttcgatgcagtaattggtaatgggtcactgcggataaacctgtgatgtaatcaatcgtgcgtttgcgcttattgtatggatcgacaccaattgggaggttaatcgttgcatgttccaagagtgtttgttccggatcgttagcaatagcgatgtattggcgcgacattgttttttgactaagctgtcggtttaaaatgccgatgacgattggggttttaccaatcaagagcacgccactggttgcttgatcgatgcggtggaccatgtaggcctttttatcttgtttagcaagataggccgccacttggttcattagggtgaagttttcaccaggaccgttcggatgggttttaatccccgccggtttattgacgaccagtaaatcatcatcttcgtataaaacggaaaaagattgccgttcatcaagttcgtagtcttggaccttaacggaaacttctgagaagttcatcgtaatttgatcgccagcttcaacgtgtcggttgaaggcgagataatgtccgttgaccaaaatatcttgattaatccgcaagaaatgttgcattttttgcggcactaaccagtgattcagcaggccgcggacagacatcggactaaagtcgggcgctaaagtcacttttttttggtaaattatcattagagttcaaccacctttaagctattagtttagcgaaaattggtgtaaaagtaaattttaaaagattgttaatgtcttcgattggcatcagtgtcaattgacgaatatgctacaattaaacaagattaattttgaccgtaagaagagggatcgcatgaacaagcaagattcgccgttttggttggcgattaaacaatttatgaaacgcgtctggcgcgtgattcgttatgtctggtatcgactacaattgacgagatggctgattctcgctgttttaattctcattttcgcgatgagcagctggctcacgtttaaagcgaagacggctaacgtcggtgagattaaggccaacttacaaaccccaacggcgctttatgacattaaggatgaacgcgcggggacgttatattcgcaaaaagggacttatgtcgatcttgataagatatcgccgcagattcaaaatgctgttttgtcgactgaagatcggaccttttataccaatcatggattcagtattaaagggctagcacgagcagcagttgggttagtgattcatcatgggcagattaccggtggtgggagtacgattacccaacaactcgccaagaatgccaagttgagtcagaagcagacgttctcgcggaagtttgaggaattattcttagctgttcagattaccaaggtctattccaaacaggatatcttagcgatgtatttgaataatgcctacttcggtaacggggtgtggggcgttcaggatgcgtcaaaacggtattttggtaagaatgcgagtgaattagatgctagtgaaggcgccgtgattgcagcgatgttgcggagccctagtttctataatccggctgaccatttagataatgcgactgcgcggcggaacttaattctcggcttgatggtcgataataacaagttgacgcaagcacaagccgacgctgctaagaaagagcaacttgtcgtgacgaatacctacgagcagtcggatgggtatcgttatccgtattactttgatgaggttgtgaatgaagccattaaccgctttgggttgaaagaagaagacctcgttaagaacggatacaagatctatactgccctcgaccaatcccaacaaagtaagatggaaaccacctttaaacaaaattggttgttccctgataacgctgcggatgacaccttagttcaaggtagttcagttgcaattgatccgaaaaccggcggggtatcagccgtcgttggtggtcgtggtgagtatacaatccgtggttatagccgcattacacagatgaagcgtcaaccgggatcaaccatcaagccattggcggtttatacgccagccttagaagatggctaccactatgattcatcacttgaagataagaagcaaagctatgggactaaccactatataccaacgaacccggataacgtttataccggatcgatgccaatgtatcaggcgctagccaacagtacaaatgcgccggcggtttggttattaaatcaaatcggcctcaaacgcggcattaagtcggtcgaaaaattcggcatttcagtacccaagagtgaccaaaacttggcgatggctctaggtggttggcaaggtggggtttcaccttaccaaatggccagtgcttatacggcttttgcgaataacggtgaattgtctgaaacacattttattcggaagattgttgatgcgagtggcgccgtgattgttgataataccgaaccatccaagacacggattatgagccaaaaaacagccaaagaaatgactagcatgatgttgggcgtttataataatgggactgggcgttatgcgaaacccaacggctatcaagtcgcagggaagtctggtagtactgaagtgcctgatagttatggctttgggaccaaagatcaatggttagtcggttatacgccggatattgttgttgcgacttggatggggtatgacaagacggatcaagatcactttatgaagaacactagcattgacggtttagcaccaatctttaaatatgagatgcaacaactcttaccaaccacagcacagacggactttgatactgaagatgctcaatcgttggcgaaaaaagaacagagtgggacatcgaacgaattagtcgattcaattgaatcgggttttaaagatgggataaataaagcgaaagatacagccaatcaatggtataataatttgaaaggttttttcaattaaatacatggaaaaaggagtcagtacaatgacagttaatatttatgatgatgccaaccaaatggcaacgcacttgcaagaattaccacaatttttaggcttacaaaatgcctttgcagcattgaaaaaagacgatattgccttcacaatgtttaagaaattccaaacgcaacaaatgacacttcaacaaaaacaaatgcaaggtcaagaattaacggacgacgaaattaaagaaatccaagaacttgctcaaaaaattggggatatcgacgcaatcaagaacttgatggaacaagaacgtcaattaagccaaacaatggatgaattaaaccaaatcatctcaaaaccaatcgcagatatctaccaagcatagaatgcgtttgaaacgggtttggctttgaggattaacctaaaaatgagactgatggcgtattttgtcatcagtcttattttgtagttaactggaaaagtcagtttcaaaaagcacgtttcaaataagagtgtgactgattgcggtcagcaactgagcattaatacaaaaatcgcgttaatccaggttctaggattaacgcgatttttaaattaagcggaagttgttgcaaccagaagcacgtttcaaacggtgaatcgattgatttcgattcaccgcttttttattgcctaaaaacagaacgtttgttctaatcgcctttatcacaccgcgtggcaatggtataatgaagcttatctaagctggttacgaccggccaaaagaatggggtttttcaagatgaaatttatccatgcagctgacgcccatatcgacagtccgtttgtcggattaaaacaagcaccgacagcattgtgggaaacaatccatgcgtcaactttcacggcgtttaaaaaattaattcagacagccatcgatgaagccgtcgattttgtattattagttggtgattcatttgatcaagaagcgcagagtttgccagttcagaaatttttaaaacaacaatttgaacgtttggcagatgtcgacattccggtctatctgagttacgggaatcatgattactgggatgccaatcaagtgcattttgaattgcccgccaatgtccatgtttttggagcacaagtagagtcgtttgaactgactaccaaaggacatgagagtgtgaccattgtagggttcagttatgatcaacggtggttgtcagctgatcgagtggttgattttccacaacgtgccagcacaacttacacgattgggacgttgcacggtagtcaaaaagcaacggccgatacagatcactacgcaccatttacgattagtgaattgaacgcttgccattacgattattgggcattaggtcacattcataagcgccagattctccaagaacgaccagcgattgtttacccggggaacttacaagggcggcataagaatgaacctggtgaaaaaggcttttatttagtggataccaacgatggtcagttcgatttaacgttcaaaccaacgacggtcattgagtggcaacgtcaacagtttgaggtgacacctgacatgagcttaacgcaattgcaaacggctttgagtgcccaattgatgcaaagtgatcacgctagtttagtggcgctagagctaacacacgcggagcgattatcgagtgacttattgcaacggattaataatggtgaattattggcggtgttacaagaccaattggaaaatagtgaaccactgcattggccatacgcgttgaagttgcggtttgcagcacaacagcaatttagtcagattgaccaagcctactgggaacaagcggctgcagctatcttgacaccggacaatattctggaaaaagcaaagccgttaatgaaggaaaactttatccgggaagcaattgaaacaccagaatttcaagcggatctcaaggacttagtcacgacaattctacaagagaagaagatgggggattagccatgcgaattaagacagtcaccattttgggcttcggtaagtggcatgatcagacgattgatttgaataccgactatcaagtcctttatggtcaaaacgaggcgggtaagacaacccttacagcctttattaaaggcgtgttattcggctttgcgaccgctaaacaacggtatgaacaatatgtgcccaaaaacggcgcacaatacggtggtgaattactggttagctatcatgatcgcgatattgtgattcggcggctttccggtaagtttgggggcgacgtaacggtcatcgatcaaggccaagaatttggcgctgattacttagctgacctcttggcaccagcggatgaagctttgtttacgcagatttttgaaacgaaccaacaggatttaaatcagatatttaatctaaaacaggctgattttttgcagcatttattgacgattggtgcggtggggagtcatgagtggctcgactttgccaaggaactggataaggacagtcagaaaattttcaaaccctctgggcgtaagtggccattgaatgttgctttgaagaattatccagagttagtgcaatccgttaacgaagctagtcgtggttatcaagaatatgaaacgaacgcacgtctattgcagagtaccgttgcgacaatgacggaacaccaaaagcaagtggctgaattaaaacaacgccaagcgcagttgcaacatttgcttgatcgttggccaagttatgcggaatggcaagcacttcaaactaaacttgaaaaggcaacgccgtttgacttaacgattgacgaacaataccaagcattagtggtcgaacgagaacgcaatgcaaaggcgttagcagaagcaaaatccgaggtagcaactgttcaagaaacattggatcaaacaggtgaatttcgattttatcaagctaatcaagagacgttggtgccattgtttgaacaattaaatgaacagcaaaaacaaattcaattacttggattacggcaaaaccaaagcgcacaactcgctagcgaaaaagcccaattagcagcgcagtatcaatggcaaacggatcaactaccaaatcctttgacagatgagcaacgcgcacaactagaacaagccgaagctgaaatgaatggggcaaccacgaccagtcaagtgctgaccaagcaactggctgatttagaggcgcaattagccacgcaaaacgcggcagttagtcaggttgaaccacaagaaacgccaacgactgatggacgtgccagtcaattgagtatgctgattggcgtagtcatattcatgattggtcttttcttgccgggcgctctgaaagtcattgcggtcgttggactagccgcacttggctatggtggttacatgatgtggcaaaataaacaatctgaccatgaccaaccagtgcaaaaacaagcttggcaacaagcgctcgctaagttggatgtgttgcaggctgaaaagcaaaccaagacagctgccttacaagcacaacaagcaatattgcagacgatgcacgaacaaagcgcggtattattggcgcaaactggctacgaaacggcgatgccaatcagtcaagttttagcgatgcagcatgctttaagccggatgactcaattgaccatggcgctcaaacaacaacaagccgaaaatcaagcaatcgaagcggcactaaatatgtattgggatgcgtttgcttttgcccgtgattgggtgggggcgttacagggcagtcatgaagagaacttgtcccaggtgagccaattcaaagcccggattacccaactcacacaagaccttgcacaaagcagcgagagttaccggtattatcaacaacaagtgacacgcttaacagacacgattaaagaacaagacgctgcacaaacagcattgctagcaaaggctaacttaacaaccgccgcagaattagccagttgtgttgccaatgagcaacagcgccgtgctaatgaacaacgtcaagctgatttaaaacgcgaattggcaacggacttgtcggctttacaagcaatcgctagtcaagaacagcttaagcaacaagccgctcaaattacagaacaagtggcaagtttgacaagtcagttacaagaacagcaacaagctgttgcgcaactacgcgtgacgcaagcgcaacttgtcgataatgacagttatcaacaacagcgacagcgacaattacaagaacaggctaagattactgatttagcccaagagtggctcgctaagcagttagcaattgattggattcaagcgacgctgaaggccgcttcacaagaacggttcccccgtttattggaaaaggcaacgcagtattttgcaattctaacccagaatcggtatattaagattaacttcgatgacacactgatgacggttttacgggcggatcaagtgctttttgaagtcggtgaattatcacaggggactgcagagcagttatacattgcgctacgctttgcgtttgcagaagaggtagctgacgtagtctcattacctttattggtggatgatggattcgtcaactttgatgatcaacgccaaatcgccgtttggacattactccaacgactcagtgcggccaaccaagtgatttatttaacggccaatccgcggacgcaagcacactttgaagcggatcattggttaaatctagaggaagtggggctgacacatgacagcaaagaaattatttgattaccaaaacgacgagaatctggatttatttgtactaattaaaacggcggacgtgcggattgctaaaaacggcaagcaattcatcgcgtttacgttccaagatcaatcgggacaaatcggcggtaaatactgggatgcttctgatgaagacgttgctaaatttacggcgggtcaggtgatccatttacaaggtaagcgggaattataccaaaataatccgcaagttaagatttataaactgcgcttaacgacgggggacgaaccgcaaacagttgaccagtttattcctaaagcaccggtgcaagtaaccgagatgcaagacgaatttggcgcgatgttattcgaaattacaaacccaaattggcaacgtttggttcgacatttaatgcaaaaacatcaagcggaattcttcagttttccagcggctaagaccaaccaccacgcgtttagtggcggcttggcctatcatacactttcaatgttgcgcttagctaagacgattgctgcccaatatccacaaattgatgaggcattgctatatgctggtgttatcttgcatgatttaggtaagacgctagaattgtccggtcctatttcaacggaatacacggttcgtggcaatttgatcggtcatattgtactggttgatgaagagatagtgcgggcttgtgatacattaaagatcgacgtgaatgctgaggatatgttgctattgcggcatgttatcttggcccatcatggtttaatggaatatggttcacctgtccggccacaagttcttgaagcagaagttctgcatcaaattgatgaattagatgcaagtatcacgatgatgacccagtcattacaacatgcggaagcaggtcagtttactgaacggctcttcgcaatggatgggcggcgtttctatcgcccagtcgaagatcctaatttagatcaaccaacagaataaatgtacaaaaagacccccgctgctgtcgcagcgggggtctttttgttaatgcttatttagatgatgattttgaagctttgctgttaacgccgtagcttgaaaggatgtctgataaatctttgtccttgatagatacgttagcgttcttaagtaccttagtgatgactttgttcatcactgtttggtctttaagccatgaagcgtaaacgatgtctgttaattctttcttgtgatcagccatcttacctttaccagggttcttgatcatccggataacgtggtaaccataagttgtcttaacaggggttgttgtatattcgtttgtctttaatttgaaagcagcagtcttgaatgttgagtcaagtgatgtatcagtactatcgaagacaggtaatttaccgccatctttcttcgtaccagtatcagttgaatatttcttagctaattcgttgaagttctttgttgagttgtcttttgcaagtgcatcaatgacttcttgagctgtttctttcttttcaactaagatatgttgaacttggacttttggttcgtatgatttccattgtttcttcaagtcagcattggttacttttttgttatcttttagtgctgcttgtgttaagtattgtgttttgatgctgttcttaaatgatgtaggtgtcatactgctttgtgcaagcacagagttgaatgatgaaccgtattgttttttgtaaccatcataagttttcttaacttttttatcgatggcttttgagccgtattggttttcaagcgctttttgcaagatcatttgttgcaattgttgcttgccggcagatgtttccttgatttctttatagtattcgtcttgagtgattttaccaccctttaggcttgcgatagtcttgctaccacaacctgctagtgaaactaccattaataaactggcagcggctaatagccatttcttcattgtatgacacatccttatcaaagtatttatgaataaattcgtagtgaattcaccaattaatataacacataaactaactaaattgaacgaagcgtctaaaacttcacagaactttcaaatttaggttttacgctaaaaacgcgggaatcgttgatatgcttaaccttatcgcttgcatacaatctaatttttggtgaatttatttttttaagttttgtgtcaaacgatcaactgattcttcgatttgagcaattcgtggtgctgcttcaaatgaaaatgtttgcaatgcatcactgataccaccaagtgatgtaactgcagttgttttgagttcgtttgataaattttgcgaagctgtttgcaattgaacagcactttgttgaacatcagttgaactttctgagagctcgtttaaatagcgggcaatcgcttgttgtcgtttggggccggttgtagaagcggtgagaagggcataagccgtccctaataagccaccaactagtaatccttctgaaaatgacatgattagtcctccaattgtgcgtgaataccatctgcgatcgcttgtagttggtcagcagtgtaatcagcgctattatcaccgaattgcattgcaaatgaatcatccgctgtgtaacgtggaataagatgaatatgagaatgaaaaacggattgataagccaccgcaccgttattattgcagatgttcattccttggatggctggattgctagctttaatagccttagcaatctttggaatgcgactgaaaacggccgcagctaaatcagcatcgtattcaaagatgtccgccacgtgtttttttggtaccaacaaggtatggccgggtgtcacttgtgtgatgtccaagaaggctttgacatcgtcgtcttcatagaccactgtgttcggaatttcatttcgaacgattttgcaaaagatacaatcatccattaattatgcctactttctcttatttgaagtctcaatacagcttaatgctatcataaacaagggcttttcgctactgccatcagctttgtaagcggatggaaaaatattgagtgggggcatacactcgcagtttacttcgtgttaagatatgatatgaaaaaggattcactaaaaaagtagttttaaaaaccaaaaaacgaggctattgattatgagtttagagattaaccaattaacggggggctacgcgcacgtccccgttttaaaagaggtcagctttactgtgccaaacaatcaagtggttggtttaatcggtttaaatggggccggcaaatcaacaactattaaacacatcattggattattgacaccacaaaaaggcacaattactttagacggtgtgacgttacagtcgaatcctgaccaataccgccaaaaagtagcctatgtgccagaaacgcctgtcttataccctgaattgactttaaaggagcatttagaattaacaatgatggcttatgatttaaacgttgaagagacgtgggttaaagccaatgcattgttaaaacgattccgattagacaataagttagactggttcccggttcacttttcaaaagggatgcggcaaaaagtaatgatcgtcaatgcatttatgacaaatgctgacttgtttatcatcgatgaaccttttactggattggatccattggcaattcatgatttattagaaatcattgctgaaaaaaaagcacaaggagctgcaattctaatgtcgacccatattctcgcaacggcgcaacaatatgctgattcatttgtgcttttaaatcagggtcgcgtacgaacgactggcacgcttgaagaattaaaggttgaatttaacatggctgacgccgatctcgacgatatttatctgcagatgacgaaagaaggttaaccatgcaagcattatggcaaaaacgcgtgcaaaaacatattcaagaacaagtgaagtatttgcgcctcgttttcaatgatcatttcgtgattgcgattatctttttattaggagcgttgggctacacatatgctaacgccgtcaaaggactggatccacaagcttggtggctaaaacctgtattgagtttagtattacttgcggcagttagttttggtcgcctagcaacattattaaaagaagcggatagtgtcttcttattgccaaaagaaagcggccttgtgacgtatttgaaatcagcacgtttatatagtagctggttaccattaattgcaatggcttttgtgacgcttctagtggcgccactcttgttaattactaagacggtcccggcatggcacatagccgttgccttgattacattggtaatcatcaaagaccgccgcttttcaatccagttgcgtcagtggtaccaagcggatgaaacccaggcaacaaaagggctttcgttaatcctcgatttggcaataattgccagtcaattatatcagtggctaaatttagtcggagtgcttgtagcgcttggactagcctattatcagcgacaacaattggcgcgtgttcaaaagacacagctattcgattggttagcggcagttggtgcagaagattcacgaatgggacgaatttaccgcctctataacctcttcacggatgtgccagggctcagtagtcaggttaagcgtcgtcgctatttagatggcttattaaagccaattatagctaaaccagccaatacttacctctatttatatgcgcgtggctttttgcggggcacagaattcagcgggttatatatccggttagttgttttagggggcatcattctgtgcttcagtcacatatggtggttgagtttggcactcggacttctattgatttatctagttggttttcaattattaccgttttacaatcagtatgatcaaattattttcactcatctatacccagtaccaacgaccaaacgaattcaagcgttcagccaattaatgcggactttattattgcttcaggcgttactctttagtgtcattttattagtgacactagggatgacgattcaagttggtttaagtgttttagcattgttcgtgctcgtgattggctttgttcaattctatttgcctaaacggttgggggcatagtccctgtgacacgcatgctttcctacttgacgactactggctaattattatatgatacccttagttattagacagttgaagcaacgtgagcgctgtattttggcgctttattttattgaagaggagtcgaggctgatgaattttgacctggatactggctggcaagttcgtccggccggtggtgatacgggcgctgcatttttaggcgttcgcgcgtcagaaaagattttcctaaagcgcaacacatcaccatttttagcggcgctctcggcagaaggcataacaccacgcttaatctggacgaagcggatttcgagtggggatgtcttaaccgcacaagagtggctcaacggccgaaccttgaaacgtgatgagatgaatagcccacaagtcgctaagttattagcacgggtgcatcaatcccaactattgaaacgaatgttacaaaaagttggcggtcgtgtctggtcagcaaacgaaatgttgcaagcctatttttacgacttaccgcaagatttacggcaacacccatttttagaacaaacagctgattatttgaagcaaacgttacgtcaattacaagcaccttctgcagaggtgtgccatggcgatttaagccataagaattggttgttatcggatattaatcgactctacttagtggattgggactcggcaatgttagccgaccctgcagtcgatttcggaatgattttatttcaatatgttccacgtcaagaatggcacgagtggcttgagaactacggcctagaggtgacgcctgaattaatgatgcgcgtcaactggtacggcagtttgaacctactccaaagcattaagcaccattatcaacgtggtcgttttactgaaatgaaccgtgacatattgcgcttagaagcagtgatttctgaaataattaataaaaattaaatgccaaaggttgggcaagtgtccaacctttttgattggcatcaacaaggagaacataatgcgtttaagaaataaaccttgggcggcggacttaattgcggccaaccccagcatgattttagtgagtccggaagatatcgccggcaagtggcaaacacgttttgccaaagaacaacccatttacatcgaagtgggttcaggtaagggccaatttatcactcagatggcacaaaaatatccagaccggaactttatcgcagttgaaatccaagaatcagcgattgccgtcattttacaaaaacaagttgaattgaaattgccaaatctccaattattattgggtaacggcgcagccttaacaactttctttgctgaaaacgaagtggcaggggtgtacttaaacttctctgatccatggcctaagacgcgccatgaaaagcgccgattgacatataagtcattcttagcggaataccaacaaattatgcaaccaacgggctacttacgtttcaagactgataaccaaggtctattcgaatactcattgatgagcctgaatgattatgggatggtttttgacgacatctcactcgatttacacaatagtgaacttgcagaagacaacatccaaacggaatacgaagaaaaattcagcaagcgcggccaagtgatttacagattagaggcacactacaagtagagtgctttcaaagctggtcagcacccgagcaatagcctagtctggtgaataaccaatgcaattggttgtttgccggacgtagctatgcacagggtgctagctttgaaagcacgttttagataagagtgcacttgacgctcggtcagattttgagcattaacataggctggcgaatgagtgatataatcgctaatttgacaggtgtagttaggcgcagaaatctagcgtcaatagcacgtttcagcaagagtgtttttatcacacgggttgcctttgaggattagcctaagaaagggattgatgggggttctttaccatcgattcctttctgtagctaaccggaaaagacagtgtgataaagcacgtttcaactcaaaaaggtacgttatccagattttatctaggatagcgtacctttttaattataatattggttgaaacgtgctccgcgcggtatgttcctgcggttagcaacgtcagtcaagcgaccaataaattggtcactcgtctgactaagctaatcctcagaacgtgcccaccgcgctgcgcactctaaatttgtgagaattcaatcacgacgccggttcttgcgtctaccttgaatcgaaattggtttgtaccatcttcacgctcgcagatgatgccaccttgatagactggaaaggtccgtttgttttgtgagaataagtggggactttcttcaatccaagaacccacaatctggccttcatgttttaagccggctttaacatcttctaaaatttggtttaatttgatcattctttgttgcgcccgatattgcttcgcactggcagccgccgccagcgcaaaaccgatgccggttaataaatatttaaacgtttgcccattttttttcaaagaaaaactcctcagtcgtttttgtctttaaatagtatagcataatttttggtcctaaggagtggacatttacggacaaaccgcttatattaaaacgagtagtaaaattgaaggggtgcataatgaaagaattagcagcgatgacagatacgaatctgactcatctgattactgaagggaaacatgttttattttttacagcaacttggtgtagtgattgccggtttattaaaccagccatgccagaaattgaagctgaattcccggaatacgactttattgaaatcgatcgggaccaatttatcgatatttgtgaagaatgggaaatctttgggattcctagctttgttgtgattgataacggtaaagaaatcggccgttttgtcaataaagatcggaaaacaaaacgcgaaattactggatttattcactcattgaactaaccttgaaggagtcattaaatgttaattgcaagtatgaaccaagcggcttttcccaacatcttagtggtaatgacccaacctgatgttgaaaagcaagtgacaactgaaaaacaatcaatcgtacggattagtgatcaggcagatcaaaccatcggctataatttcttagcggtgaatgagttattgcccgatttacaattcaacggtgttcaaacactaactgaacagcaagttgctgttttaaatgaagcacttgtagcagctggtttcaccggtgatttagtggctgatgaaacaccacacattgtcgttggttatgtccaagaatgtgatgtgcatcctgattcagaccatatgcacgttactcaaacacagattgcacctgatcaaaccgttcaaatcgtttgtggcgctgctaatatcgcacaaggacaaaaagtgattgtggcgacggtgggcgctgtcatgccagaaggtaaaattatctggcctggtcaactccgcggtgttcaaagtgacggcatgatctgtgcagcccgtgaaatcggggttgctggtgctcctgctaaagggattatggtcttgccagatgattgggaagtcggtcgtgaagtgacagcagatgcagtcgcagccctactaaaataatccatcttacgattttgttatgggattattaaaattaaaatagtatgataatagatagcaattaattggttaaagataaaccttttaattgttatttcgttttgcagtcaattaagcagtaaaacacaaaagaggggttaaacatatgtgtgggattgtcggatttgctggtggattatttgatttaccaaagaaaaaagaagtattgaaccaacaaatggacgtcattaaacaccgtggaccaagtggtgatggtgattttatcgatgataaagtcgcattaggctttcggcgtttatcaatcattgatttagcaaagggtgatcaacccatttataatgaagaccacactaagctagtctttttcaatggtgaaatttataattatcgtgaaatgcggactgaattgatcgcacttggtcacgactttaaaacagattcagatactgaaaccattttgcatgcttacgaagaatggggtaaagaggttgttacaaaattgcgtgggatgtttgtctttgtcatctatgacttacaaactaagcaattatttggtgctcgtgatttcttcggcattaagcccctttattacacgactttagcagatgggactttcatgttcagtagtgaaattaaaactttcatgcgccatccagaatttaaaccagaactaaataagacagccttaaaatcattcatgatgaatcaatacaatgatttacaagaaacgttcttcaagggtgttttcagattcccagcaggccattatttcacttatcaagatggccaattggacatcgaaaaatattgggatatgtcatttaatccttcaaacttatctttcgaagaagaagtggctaagattgatgctgcagttgaagaatccgttaaagcccataatgtggctgacgtaccagttggggctttcttatcagaaggggtcgacagtagttatgtcacaagtattttgcaaccgcaagaagtcttcagtgttgggtttgatgatcaaacctataatgaagtcacagcagcccgggcgcttgccgatgaattaggcttgaacttcaatgaaaccaaagtgaatgccgatgatgcgtttgctgaatttgacaaaatccaatattacttggacgaaccagatgggaacccatcatgtgtgccattatggttcttgtcacgctttgcccgtgaaaaagtaacggttgccttatctggtgaaggggccgacgaattattcgctggctatgtcaactacggcatgcactcccacaattcaacaattaaggccttcacttctggcttgaagaaattacctaagggtgcgcgtgccagtttagccaaagccgttaagaagatgccagccttcccaggtcgcgtccatttatacacgaatttggcgaacccgcgtgaattctatacgggtcaatctgtgatttttgatatcgaaaatccaagtatttttggggcagatgaagccaatactttcttgaaacctgcttatcaaaatgatggaacgattcaagcaaactatcaagctgattttgataacgttgcggatgctgatccagtctcacaaatgcaatatatcgacttacatcacttcatgttaaacgatattttgcaaaaggctgataagatttcaatggcgcacagcttagaattacgcgtgccgttcctggatcctaaggtggctaaggccgctggtgaagtcccaactaaatacttaattaatagtcatgatacgaaatacgcttatcgtcaagcttctgctaaacatttgccaacagcttgggccaaccgtcctaagttaggtttcccagtgccaattaagcaatggttagaagatgacaagtattatgaaaaagtcaaagcactctttagcgaagatttcgttgcagaattctttgatcaagataagttattggccttgttagatgccaataaagaacaacgcattaacggccgtcggaagatctggaccatctttaccttcttaacatggtataaagtctacttccaaaatgtcgaagattatttagcattaggctagagtgtgacctatagaatccgtttaagtgcagccacaaaattaatttttgtggctgctttttttgcgttttagagatcaatcaattgataacagagaaaaataaacattcattatttagctcaaacccgcattatggtaaactataagggattagtttaatcatatagataattgtgatttattgaaaagaggacgtttaaaagatgataacaaatgacacagtttaccattttgttgggattaaaggttcaggaatgagtgctcttgcacttgttttaaacgacctaggctatcaagtacaaggctcagatatcgatcaatatacgtttacacaacgcgatttagaacgagcaggaattaaaattctgccattctcagaaactaatttacacgaaggcttaacggtgattgccgggaatgctttccaagatgaccaaattgaaattaaaacggcccttgaaatgggcttgccagtcgttcgttatcaccaattcttaggtgaattattgaaaggctatacaagtatcggcgtggccggtgcgcatggtaaaacaagtacgagtggcttattagctcacgttttaagtggtgtggctaagacgagttacttagtcggtgacgggacaggtaaagggattaaagatgcgcaattcttcgcatttgaagcggatgaatatcgccgtcatttcctagcttattcaccagattatttaatcatgacgaatatcgactttgatcaccctgattattacacaggcttagatgatgtgtttgacgcgttccaatcagaagcttacaaagttcaaaaagggatttttgcttggggtgatgatcctgaattacggaaaatcaaagctaatgtgcccgtttattattatgggacacgcgaagacgatgacttccaagcccgcaacatccaacggacggtgcaaggttcagaattcgatgcttactatcatggcgaaaacatcggccattaccacgtcccactttacggtgaacacaatgtcttaaacagtttagccgtaattgctgtcagtcatttagaaaaaattgatggcaaagaagtggcacgcgaattggcagacttcaagggtgttaaacgccgctttacagaaaagaaagttgctgacgtgacaatcattgatgattatgcgcaccatccatcagaaattaaagccacattggatgcagcacggcaaaaatatccagacaaacaaattgtagcggttttccaaccccatacgttcacacggacaattgcgttaatggatgattttgccgctagcttaaaccttgcggatgaagtcttcttaacggatatctttagttcagtgcgtgaaaaagcagggaaggtttcaagtgctgacttaggtgcgaaaatcactaaaggtggccgcgtcttgaaattagacaatatgtcaccgctcttagacttcgaccaaccagtcgttgtcttcatgggcgctggtgatgtgcaaaaatacgaatatgcttacgaagaattattgagtaatttaagtcctaaagataattaagatttaggcattttgattgtctttctggatggatttgttacaatattcctaatcgggtgattatgggcccgtttagaaatataagaggtgaatattcatggaagaaagacgcgttgtgaatgtcgacagcgaagcccgctttttcagtaaagtgtatggtttgatggctgtcggtgtcggaatttcagcactgattgctgttttaatggtgactgtgtttaaagcacaaacttacacaatcctatcaagtggtagctcgtggatggtttggggcttgatgattgcagaattaattttagtcgttcagattagtcggcgttcaatgaagaatccaacggcctcgttagccatgtttgtggcatatgcggcgttgaacggattgacgtttacggccgttttactggtgtataacattggtgaaattggggcagctttcgcatcaagtgctttagtgttcattgccatgtcgatttatggtcgcatgacaaagaataacttaagcggctttggcaagtttgcaatgatggggttaatcggtgtgattattgtctcattggttaacttcttcatggcatcagctgcaattagctacttcttgtcatacgctatgttaattatttttatcattttaacagcatgggacaatcaaaagttaagtatgatgtaccgtcaatacggcgcaactggtgaaatttcggtttctggtttagctgttatgggcgcattaaccttgtacttagactttgttaacttattcctcacaatgctccaaatttttggcggcggcagagattaagggtttgataacagtcgggatatgactgttatcaaacgtttcaaaagaacggtcatcaggtaaaactgatgggcgttctttttttatgcttgacacaatactatgcataatatagtattaactttcgaaagggtgatcggtttgaatccacaattaaagaaaggcctcttggaattttgtgtgttagcaacgcttaagaaagaggattcatatggctaccaaattatcaaagatacatcgagtgtcgttgaaatttcggactcaacattatacccaatcttgaaacggctcgaggcgcagggtgaaattgaaagttatcgggtcgaacataatggacgcttgcgtaaatatttccatttaacattggcgggacaagcatcgattgatagttttttggccgattggccggcagtgatgggcatttatacttacataagggagtgtaacaatgactaagaatcaatttattaaacagcttgcggcagaattaacgcggtatgggattagtgatgcagccaacacgattgattattacgatgaattaatcgatgatcgactggaagcgggtgaaacggaagcggagattatcgcgagtttagcaacgccagctcagattgtagcgcaattagctacaccagataaaccggttcgccaaaagaagatggcaccgatgttgattattttaatcagtatcttgttagttttagggtcaccgttatggggcacgttgttattgaccgccatcatattagtggcacttggttatttcttgatttggttaggcccgtttctgggggcaatctttgctgctgccggcattcttggtgggagtgtcagcttagttttatcgttctttgttggcttacaagaaggctggataattgcggtgatgcagcttggaattagttttgtgatggttggtgtggggctgatttgtgcaggggcgacctggtacatgacgaaatacttaattcgtttctcggttggaatcacacgctggctagttgggatgttccgtagtcgattaaaggtggtggcgtagatgttgaaaaattggttgaagattagtttatgtatgattcttgtgggaattattttaatgaccgttagttttgggatggcgggttttaaaagccaaccattccaatatcgtggcacacatgaatggagccggacgtttaacttttaagataaataaaaagaggtgccgatgatgataatcgacacctcttttgttcgttattgaccgttccatggataatcggtactgatattttgattgaaatgtttttgactttgaaaatttgcgagacggtgggcttttcgttcctcataaccggcacagatgaaccgttcttccggtgattcgggttgaatgttaggaagggccggacctttttccattgtgacaaaggttaagaaggcagttagcccgaggaatcgttcgccggtcttgagatgttcaccgataatcttagtaaagatttcaatggaacgggtgccgacaccggcaacgtaactttcgatgcacaaggaatcttgcattttgaatggttcaatgaagttcagttggtcgatgctggcggtgacggtttcgacgcgcgctaagcggctagctgaaatggacgccgaaccatccaagagttcaagcaagcgtccgccatagaccgtttcatgttcgttcaaatcattgacgaagacgcgatggttactgatggagagggtttgacgacaggtgatgagatttgacattataaaaagactccttattaatcatttagatgggggacaatcagttggctagcagccaagtcgacttggtaaacgaatgcttgctcttcacgaatcgtcattcccatatcagtcgcgtagactaatagaccgagttgatgtcccgctgttaaatcataatgggtgggttgtaggtcgagcgtgatatcatagaattcgtttggggtgacggcgtcggtttgataactattgtggcgattttggagattgatgtgtcctttagtgatgacttgataattgcttggtcgattgagcttaaattcctttaaatcatcatagcgccactgatagccgagttgttggcctttagcagctaatacagcaggtgtggtgcctaaacggttgaattgaccatagtcaataaccagcacgctcaatagcccacgttcggcattgacagcgacccttgttctaaactgaattcgaccatcaataatgagcggttcggtaagcggggagcctaagaaacgcaaccggttgccagtgaaacttgattgatctgcgattaaggcatcttgccaagcggctgtactgattttttgggctctaaaggccgcaacaccgtcatctttaaaagtcgtcagtggggcattttcggtagcattagtgcttaatgtttgttcgtttagccagaaagtcgtagttggattgtcgagggctagccaatccgcctgggtcgtccaagtggcttcttgtgcgttgtcttgaattgtaacagccggtaattttgtgacagcctgattctcaacgccgagtaattgatgcgtgaaccataagttcatcatatcggtgaaatcgatcgactgaatgttattcatatagatatgttcaccttggtgtaagaaaagcttcttattaaccggttgatcgcgcaataaatcccacaaggcgccggcattttgtagtttaacgttccaatcatttaatccgtggactaagatgacatcgcaattcaggttggcgagattgtcacgatagttacgggctgcccagaaggcgttgtaattgcctgtgatgcgatcttgaccttcttgcagggctttgagttggtcggcgaagaaagtgccagagagcgcatgatcagcggcatctttttggcgggtttggcacaacttcgctaagacatcggcatcttcaccctgacaatcaattggggcgaccactaagccattttcgcggtagtaatcgtaccaactggaaatggcggcttcagctacaatggttctcagaccttcaacgccagttgttgcagcagcagtggctaaagtaccaaggtaggatttaccagtcattgcaacttggtgattacaccaccaagctttaatttcaatgccatcggtgcggttggtgaaagctcgtcgattaccggctaaccactcgatgatagccgtggttgaagctgtttcttcaggtgagccacaagtccggacgccgtcggaaccgcgtgtgccaatgccgccagcgtaaacgttcgcaaatccgcgcgccagaaagtaatcatttaaactgtaattgctgtcatctgttgcgtttaattcagttgtcatacttgtgccattaacggcgcgaggttgaggaagcggtgcagtggttggcgtttgggttaaatcagctaagtttggttgttgaacgggtttagtcgcaattgtagtatcaacattgtgcaaatcagcatcgacgtcgttaatccccttatagtaaggactggcagtgtagagtgccggaatttttaagcccgcttcagtttcgcgtggtctgaagatagtcgtttctaataagtcgcgttggccgtcttgatcagtatctaggctcgattcaacataaacgacttctcgaattaaatggctggtatcgaaaacgggttgtaccttaccattgaagatgagaaattggggctgatcactttgccagtctgcaaaaaaaccacggttagccaattgatccagataaagtaacccagtttggctacgcgtcgttaataggagataaagggcttcgatgaaagcggtctgatcaaatgccgcttgatcgataaatgggagttttgtggcggtcataaaagcagtgggttgatcaagttcaaaatcggttgtcatttcaaaacccaagagttggagggcgacattatagaagacaacttgatcgaatgaagtatcaatggtttcaaggtaggcggttagatttaattcggttgtggcttgtaataaactaagttgcccgctctgggttgattgactatgtgcttctgggaacagccgttgaaaaatatcttgggcaaggacttggaaggggagctgggtgaaatcctttgggagtaaatgaatgcgctgtaattccgtgatttgttcagattgagatttagttaagcgtgcaaactgatttaattgcatgtttttccctcatttctgcgaattttaattgacagtgactacttcaattgcttataatatagcatgttatgcggtattctgacagcaaaaaccgtcaatcaatgaggtcatagtagctcagctggatagagcaacggtcttctaaaccgtaggtcgcgagttcgaatctcgcctgtgacattcaataattcttggagacatctaatttcgcacattgcttgcgaggttaggtgtttttttaatgatggagtgaatgtaaaatgcaagattatttaaaagcgcatcaaacatggttagttgatttttatcaacaacggaattggtatcgattttcaccattaattcggttgaacttcttgagtgaagaacttggggaattatcacgggccgttagaacgattgaacttgggcgtgatcacccaggtgaaaaagttaaaaacgacgctgaaaagcgagctaacttaaaagaggagttagccgattgcttcgatcaactgctcattatctgttcgaaatatgaaattgagcctgaggaattgatggcacttagcgaggcaaagtttacaaaacggttcgaaaatgattagaaattaaatatttaaataaaaagtttatgcgctttaaagcctattttaatagccttttgcgaatgaattgcgagcgatttagtcgatagttttgggatgcgggttgctaattagaaaatgccatgctatactgttcaagtaatcaaattttgaaacgtaatttgagttttggatgcacaataccttcctcttttacctatcaataatttattgcaacaaaaaacgtacattgatatgtatcaggaggaaattattatgaacaacggcacagtaaaatggtttaacgcagacaaaggttttggttttatcactggtgaagacggcaaagacgtatttgctcacttctcagctatccaaggtgacggttacaagtcattagacgaaggccaagcagtatcatttgatgttgaagacagcgaccgcggtcctcaagcaacaaacatcgttaaactttaatatttgtgccccgcatctgcggggtttttttatacaatcaattcaatcaaataagcaaggacctgagacaaaaactgtctcaggtccttttttagtttagtggaaaataatattctcatgttgccactaatgataagcgattttatagtctcaattactctgttaaatactgtaacaaatgcttttcggcattatcatagttgtattgccgagcattgagtaacaccaagttgcgatcattatcaaaaaaattaccggtgctctgcgttagatcgggatggagtgctaagtattttccaactggcacttcagtatgcagcaatgtttgggaataatgcggtagctcatcggtgacattccctgggaaaaatgaattgaccgtaatctctttttcagccagaagataactgagaaagagggttaataaagctttatgggttaataaccaccttgcacgttgtaaagtagtctcctgttcttcgcaaatgctgagttgttgaatgatttgcggatcaccggttatgataaggacgcgaccgccagttaatcggtctgctaagcccattgttagctgataatgggggactaaattagccttaatattttcttctgtgagctggggaaaacaccggcagtgtgcactagaacgtgtattttatccactttatatttgatgcttgccagtgcttggttgcgtcctgatttggtcgctaaatcggcttggataaaaaaggccgcttttccaagttgggccacagaagcccggccttttgccgcattctgtccgatgataatgacttgatggccttctgcaatgagatctttggcaatgcgatagccaatcccagatgttccaccggttatgacaatatccatatgtgacagtcctttctttttcaaattattatttaagttgattgatttagaaatgagtgcatgagatagctattaagtgctttcgttaattaacttagggtcagtatatattaggctttttagagataccaattctttaactcgaattcgtgcaccatcgacggtactatagctattaacgatatgtcttttgtttaggcagttaaattgtcaaggtcctattgggttcagtatgatgaacatatagttaggattcgcattcatttcattaataggagggtgttgctaaatgattacaacgtataagaaaattttagtcggggtcgatggatctgacttagcgaacaaggcatttatggaagctgttgaagttgcgaaaagaaatgatgctgagctttatgtggctcatattattccaagtacagtctatgtttcaccggatgctagtgtctatgccaagatgacggcgatggaaaaagatcgtgtgaaggagcaactagcggctaatattcgttacgcgaataatcatgggctaacgaaggtcaccccgattctggaagtcggctcaccgaaaaaagaaattgcgattcgcattcctgaagaatatgggattgatttaatcatgttggggattacggggaaaggggttattgaacgaatgatgatgggatcggttgcccaatatgttagtgcccatgctgcaacgaatgttttattagttaaataagaacgtctggttccaaaaaagcggtcacgacattttttgtcgcgaccgcttttttgcgtgtggttagatgacaataatgtcactgttcaaatccaaaagcgtattgtacattaatattgtaataaattaatggatagattagaaatttcggagggacagttgatgtcaaaaaaagggcgtcaaattggtggtgtcattggtattctggtcatattcggtctggtagcgggcggaattgtggttcagcgacaacatcaccaacgagaagtaaaaatcgcgcaacaacaagccaagattaagcgacaacgacaagcgcaagaagcaaagaaacagcgcgaatcacaaaaagtcgctgctgctaaagcaaaggaagaacgacttaaagcagaaagccaaccgacaattgttgcagaacaagcgttagatgactacttaaagcaaattggcttttcaggtaccgcgttaattgtccgcgataagcaagttttgttggataaggggtacggcagtgctaatcgggccaagcagttggtgaatacgccagatacgctatatgcgattggttcaactgaaaaagcgttgattgcaacgagtttattgcagttacaagaacaaggaaagctaaacgtcaacgatccaatcagtcggtacctcccggactttccgaatgggcagcagattaaactgactgattttttacatcatacatcaggcattgtcggtcgggaccaagataatcagacgaagactctcgaccaattaatcgaagaaattattaaaaatgggattaaggaacaaccgggcaagtggcactatatggatgcgaactatattgtgctgacgaaggttttggaaaaagtgagtcatcaagattacaaaacgtatctaaaagaaaaaattctaaaaccaagtaaaatggcgcacactggtttcatgacggatcaatattcgcgattaccagcggcttccattggctatctggcaaatggcgctgcgggacaactccccaatttcacgcaactaccaggggtcggagatatgtatatgacggcgactgatatgtaccgttttgaccgcgcgttgtggactggaaaattaattaatgaacagagtaaggctcaaatgttccaaccagggagtacgtcccactatggaatgggcttttacaatgatccagcactcattgttaatcgtggttatttgtcaggctggaatgtgtcgaacggatttagccacggtggccgaatctatatcgtgttattttcaaacgaaaagaacgaaaaggtttcgctcagcaagatgaacggtgaattatatactaaaataactgcaacgatttaagtaaaaaaacgggtttaatgattcagatgaaggactttaattagtgttgatctgagattattgacccgttttttaattttggatgtgctacaaatgccgaattggtaaggatgttaaattgtgtaaaatttaattttggtaaaacgctttctttttggacatcggtaatctataatagttttcgaggaaacgttttcctaacattgttgttaaaggaggattaagatgactgaaaaatacattttggcgattgatgagggaacaaccagtactcgttcaatcatttttgatcacaatggtcaaaaagtcgccgatgcacagcgtgaattcccccagtacttccccgaaccgggctgggtagaacataatgcaaacgaaatttggaacgctgttttatcgacgattgcaaacgcttttatatcatcggggattcaaccccatcaaatcgcggggattgggattactaatcaacgtgaaacaactattatttgggataaggaaactggtttaccaatttataatgcggttgtttggcaatcaagacaaacaaatgacattgccgaacaattgaagaaagatgggcatgaagaattattccatcaaaagacggggctattaattgatgcttacttctcagcgactaagattcgttggattttggatcaagtgccaggtgcacaagaacgagccgaaaagggcgaactcctctttggaaccatcgatacttggattacatggaagttaacaggtggcgcttcacacgttaccgactatacaaatgcaagtcggacaatgttgtttaacattcacgatttggattgggacgacgaaatcctcaagattttaaacattccacgggccatgttacctgatgttcggtcaaactctgaaatttatggtgaaacagcaccttatcatttctatggtagcacggtaccaatttcagggatggcaggggatcaacaagccgcattatttggtcaattagctctccaaccagggatggttaagaacacctatgggacaggttcatttattgtgatgaatactggcgaaaaaccaacaatgtcagaaaacaacttgctaacgacaattggttattcaatcaatggtaaagtcaactatgcacttgaaggctcagtcttcgttgctggttcagccattcaatggttgcgtgatagtatgcaactggttgaaaaatcatcagattcagaagcagccgctaaggcttcaaccagtttaaatgaagtttatgttgtgcctgcctttacaggtttgggtgcaccatactgggactcagaagcacgtggttcaattctagggattacgcgtgggacgaaccgacaagacgttattaaggcaacactgcaatcattagcttatcaaactcgggatgtcgttcaaaccatgcaaaaagatactggcattgatatcaaagtgctccgcgttgatggtggtgctgcaaacaacaactatttaatgcaattccaagcagatattttgaatagctcgattgaaaaggcagctaatttagaaacaactgcaatgggggctgcatttttggctggtttagcagttggtttctggcaagatacagacgaattggcgcatattttctcagttgggcaacgtttcgaaccagaaatgcctgaagaagaacgggaagatctctatgctggttggcaacaagcagttgaagcaacaaaggttttcaaacatcgaccatataaaatgcgtgaatgaggaggattataatgacattttcattagaaggacgtcaacaagtaattaataacttaaagaacgaacaacttgatttattagtaatcggtggcgggatcactggtgctggggttgctattcaagcggctgcatcaggcatcaaaaccggtttgattgaaatgcaagattttgctgaggggacttcatcacgttcaacgaagttagttcacggtggtatccgttatttaaagactttcgacgttggggttgttgcagatactgttagtgaacgggccgttgttcaagggattgcacctcacatcccacggcctacaccaatgcttttaccaatctatgatgaacctgaagcaacttacgacatgttcagtgtcaagattgccatggatttatacgataaattggcaggggtaactggtacacaatatgccaactatacaattgatcgtaaagaagtactccaacgcgaacctggcttgaagtcagaccgtttgatgggtgctggtgtttatttagatttcgtcaataatgatgcgcgcttagtcatcgaaaatattaaagaagctgacgaattaggtgcatcaatcgcaagtcacgttaaagcagtcggaatgacttatgatgcaaacggtcgcgtaaacggtttgaaagcacacgatgaattaacggatgaaacattcgatattcatgccaaattagtcattaatactgctggcccttgggtggataaagtaaatgctttaaacacggaagtcaaagcacaagaaacacttcgtcctactaaagggattcatttagttgttgatagtagtcgtttatcagtgccacaaccaacttacttcgattcaggcttacatgatggtcggatgattttcgttgtgccacgcgaaggtaagacgtacttcgggacaactgatactgattacacaggcgatttcaaacacccacgtgttgaacaagcagacgttgattacctcttaaaagcaatcaacaatcgctatcctagcgttaatatcgctttaaacgatattgaagctagctgggcaggtttacgaccattaatttctaataacggtagctccgattataacggtggtggcgctaatagcggtaaggtttcagaagaatcattcaacaacttaatcaagacagttgatgattacgaaaacaaaacagctgctcgtgcagatgttgaaaaagcaatcagtcaattaagaacggcgcatgctgaagaatcagtcaacccatcacaagtttctcgtggtagtgatttgaaagtggctgaaaacggcttaatcactttatcaggtggtaagattactgattatcgtaagatggcagccggtgcgcttgaattaatccgggatatcttgaagaaagatttcaatgaaacagttcgtgaaatcgattctaagaaattacaagtttcaggtgggcacttcgatccaaataacgtggatgatacccttaaattctatgcaaaagttgcgatgaacaaagggattgatgaagaagatgcgattgatttagcaaaccgcttcggttcaaacgtcagccgggttgtttcatacgcggaccaaggtgctgctgaaggcttgaacttgaaagaaacaatcagcttaagatactcagttaacgaagaaatgacattaacaccagttgattatcttttaagacggacaaacttcatcttattccacaatgatcaattagcagccatcaaacaaccagttgttgatgaaatggcgcgtttattgaactgggatgacgctgaaaaagcacgtcaaacagaattattggattcagcaattgctgaagcacaattagactatttaaaataggacttaacttggaggaaatctcatggaacattcaataatggttcaggcgcttggtgaacttgttgggacgtttatccttgttcttttaggggatggcgttgtagcgggcgttagcttagcaaaaacaaaagccaacggtgctggctgggttgctatcacgcttggttggggctttgcggttactttaggggtatatacctctgcatttatgggacctgcacacttgaacccagcggtgacgattgcttttgcaatgattggcaagaccccttgggcagcggtggtaccattcattatcgcccaaatgattggggcgttcttaggcgcagttgtcgtttggattcaatactatccacattggcaagctactaaagatcaagcagcaatcttaggcacttttgcaactggccctgcgattcgcagcccatttgccaatttaatgagtgaattgattgggacattcgtcttaatcttcgctttactagcattaacacgtggtgaattaacagccggtttgaacccattagtggttggggtggttatcacagcaatcggtctatcacttggtgggacgactggttacgcgattaacccggctcgagatttaggcccacggattgcccatgcagtcttgccgattgccaacaagggtgattcagactggtcatacagctggatcccagttgtcggtccaatcatcggtgggattttaggtgcattactcttcgttgtattgccataacgataaaaaaacgattaaccaacaggttaatcgttttttttgtgtatttatgatttaaatacgaattattaaatatatttatgtaaaatagttcgtaaaatgttttgacatatcagatgaagattgttagaatcaaagcataatcaacaacgagaaagtgggcaaagaatatgagtgatgtggcacttgttatgggctctatatcagattggggaacaatggaacagaccgcttctgtattatcggagttgggcgtgagttatacgaaacagattatttctgctcatcggatgccggatgaaatgttcgccttttcaaaagaagcacaggcgaacgggtatcgtgcgattattgctggtgcgggtggtgccgcacatttgccggggatgattgctgccaatacagtcttaccagtcattggcgtgccaattcaaagtaaggcacttagtgggctggattctttattatcaattgtgcaaatgccaggtggcgtaccagtggcgacggttgcgattggtaaagcgggggccgttaacgctggtattttagcgacacagatttgtggcttgcaggtcccagcttatcaagtggcactgcaacagtatcaagcacggatgcatgcaaaggcggtggcaagtaatgcagactttgactaaccaaattttaccagggcaaacgattgggattgttgggggcggtcagttaggtcagatgatgacattagcggctaaagagatggggtttgcagtgattatcttagatccgcaggcagactgtccagccggacaagtcgcggatgatcaaattgtggcagcttatgatgatcaggcacaaattatgatgttagcgcaacgtgtcgatgtgttgacatatgaatttgaaaacgtcgatgctaagacgattgaagctgcccgagaatatacatggattcctcaagggacgaaggcgctacggattgctcaagaccgattgttggagaaacaatttcttgttgaccaacagctaccacatgccacctttgagattgtaacgacccctgcagaattaataccagctgttaaaaaagttggttttccttgtatcttgaagaccacgcgcggtggatatgatggtaaaggacaagtcattctacggtccgcaatggatatggaggtggctcaacagttgttaaccgctagtgtttgtgtattagaagcgatggtccattttgatcaagaaatttcggtcataattagtcagaattcagccgggcaacaagccgtttttcccgcaatcgagaatcaacaccgagataacattttacatatcagcatctgcccggcgcgcatttcagcggcgttagcggcacaagcggaatcggttgcggcaaaaattgccacgcagattgaattagtcggcacgttaggtgtcgagttttttgtcggccatgacgggcaactctacgttaatgagattgcaccgcggccgcataattcaggtcatctaacgattgaagcgtgtgacttttctcaatttgcaacccacattcggggcgtctgcaactggccactccaaataccacaattgtggcaatcagcggtaatggtcaatattcttgggcagcactggcaagcagcgctaacagccagtcggcagtcagcagattggcattatcacgactatggcaaagtggttcaaaaggtcaaccgcaagatgggccacgtcacgttattaacgccggctgttgatgaaacgttaacggcaattaaaaagactaaaatttgggactagaggggacgctaataaatgattgaacggtatacaaatcctgaaatgggtgcgatttggacggaccagaataaatatgaggcatggctggcagttgaaattttagcggatgaggcttggtcagaactcggacacattccggctgaagatgttgcgaaaattcgtgccaatgcgatgttctcaattccacggatcttagaaatcgaacaggaaacgcggcacgatgttgtcgccttcaccagagcagtttctgaatcacttggagatgaacgcaagtgggtccactatggtttaacatcgaccgatgtggtggatacggcgtatggttatttgttgaaacaagccaacaccattttgcgggccgatatcgatgcgctattggcggtgattgccaaacaagccaaacgttaccaagatacggtcatgatgggccggacgcatggtgttcacgctgaaccaacgacgtttgggttgaagctagcactatggtattcggaattaaaacgacataaggcacattttgaagaagctgcaaaaggcgttgaagccggtaaaattagtggggcggtgggcacgtttgccaatattccaccgtttgtcgaagcctatgtgtgcgaccatttaggaattcgcgcccaagaaatctcaacacaagtcttaccacgggacttgcatgctgcctacgtggctgaaatggcgttactagcaacttcaatcgagaagtttgcgactgaaattcggggtctccaaaaatctgaaacccgcgaggtcgaagaatttttcgcgaaaggccaaaaaggctcatcagcaatgccccataaacggaatccgattggttctgaaaatattacgggcttggcacgcgtgattcgcggacacatggtaacggcgtatgaagacgttgcactctggcatgaacgtgatatttcgcatagttctgccgaacgcatcatcttaccggatactacgattttgttggattatatgcttcgacggttcaccaaaattatgacggacttgacagtcttcccagaaaatatgaagcgtaatatggggcggactttcgggttgatttacagccaacgggttcttttgaagttaatcgatcatgggctttcgagagaagcggcttatgacttgattcaacctaaaacggcccaagcttgggatcaacaaactgatttcagaccgttattagaagcggatgaccggattatgaatgtgttgacgcccgctgatttagacgacgcgtttgattaccattaccatattcgccgcgtcgcagaaatctttgaccgcgttggtttgggcgaataatgatgaaaactttgaaatgaggttatttcaaagtttttttacaccctaatgtaacacgaacgattattttaattttaaataaaatatatgttatttggagggattcaagcatgagtgagacgttgttttattctggaaaagcgaaagatgtttttacaactgacgatcaaaatgtgttgagaatggtctataaggaccaagcaacggcgttaaatggcaaacgcaaggaacagattacgggaaaaggattattgaattatcagatttcgaaattaattttcaaatacttgatggcaaatggtattgaaacgcatttaatcgagaatatttcagcaactgaacagctcgtcaagaaagtgacgattgtgcccctagaagtagtattgcgcaacgtggtggcagggagttttgcccgcaagtttggtcaagcaccgggtaaacgattggccacgccgattatcgaatactattacaaaaatgatgcactagatgatccagccatcaatatttcgcaagccaccgcgcttggaattgtgacaccggcggaaattgaagtgattgaaaaacaaactaagcagatcaaccagctgctaatcgatttattcgaccgtgcggatatcgatttaatcgactttaagttggaatttggccggtatgacggtcgcttgattttggcggatgaattttccccagataactgccgtctgtgggatcaaacgacgcatgaatcgctagataaggatgttttccgcttgaacaaaggggatttagtatcggtgtacgatgtcgtattacgacgattagaaaaaattttagggggttctacagatgtttaatgtgcgtgtgcaagtgacttataaagattcggtgctagatccacaaggccaggctgtccaaaaagctatcgaacgacttggctttgatggtgtgagcggcatgcgcattggcaagtcctttgaaatgcaagtggctggcgatgaccaagccgcagttgaaaaaaaggtcgcacaaatctgtgatcaactcttagccaatcctaatatggaacaataccactacgacatacaaaaggtggcgacgaatcaatgaaatttgccgtattagttttcccaggttccaattgtgacgctgatttatatcatgcaattgaagatgtttgtcatgaaaacgctgagtatgtcccgtacacagcaactagcttggcaggttttgatgccgtattagtgcccgggggcttttcatacggcgattatttacgcagtggtgcgattgccaagttggcaccgattatgacggcagttaaggcgtttgcggctgctggcaaaccggttatcggtatttgcaacgggttccaaattttaacggaactcgggttattaccaggcgttcttttgccgaatcgacaaacccattttatctgtgacacagtcgcgttgaacgtgaccaatgccggtacgatgttcacccaacactatatgccgaacgaacaaattcggttgccgattgctcatggtgaagggaattattattgcgatgcagagaccctggaacggttaaaagtgaaccaccaaattgcatttacttatcaaaatgatgtgaatggtagtttagcgaatattgcgggcgttacgaatgaagccggcaatgtcttagggatgatgccccatccagaacgcgcagtcgaaaccttattaggtagcgatgatgggcaacgtttatttgcagcattaatcacatcgattcgaaaaggagggcaataaccgtgttaaagcaaccaacaccggcagaaatccaagccaccaagctttatcagcaatgggggttatcagatgatgaatatgaattgattcgtactaaaattctaaaacggttgccgaattatacggagaccgggttattttcagtgatgtggagtgaacattgctcatataaaaattcgaagccggttttgaaaaaatttccaacaagtggtcagcacgtgttgcaaggcccaggtgaaggcgctgggattttggatattggcgatggtcaagcagtggtctttaaagctgaaagccataaccatccctcagcagtcgaaccctatgaaggggcggccaccggtgtcggcggtattattcgggatattttttcgatgggcgcgacgccgattgcgcttttgaacagtctgcgctttggtgaattgacggatgaccacacgaaataccttgttcaagaagttgtggctggaatcggcgggtacggtaattgtatcgggattccaacggtcggtggtgaaatcggatttgatccatgttatcagactaatccactcgtcaacgcaatgtgcgttggtgtcatcgaccaaaaggatattcagcaaggtaaagcgcgtggtgctggcaatagtgtgttctacgtcggggctaaaaccggccgcgatgggattcacggggccacttttgcatcggatgaatttgcagatggcaaggcgacccaacgctcagcagtccaagtgggtgatccgtttatggaaaaactattaatggatgcttgtttggaattaattttgaagcatccagattggctagtcggcatccaggatatgggtgcggcgggcttagtttcttcaacagcggaaatggctgaaaaggcaggtactgggatgattctcaatcttgatcttgtgccacaacgagaaacagagatgtccgcttatgaaatcatgctttctgaatcgcaagaacggatggcgctttgtgttaaagctggtcatgaaacagatgtggttgccttgtttgaacgatatgatctggatgcggtccggattggtgaagtgactgagagtcaacaatatcaattgtggcatggtgggcaattagtggccgatttgccagtggcggctttaacgagtgatgcgccgatttatcataaagcacaaactgaaccagcacgcatcgctgaatttaaagcgatggcgccttatcagtcggtgattaatgatgttaaacgaacatggctcgatttattgggccaatccacgattgctgacaaacgctcgctatacagccactatgatgcacaagtgaagaccaataccgtcgttttaccaggaagcgatgcggcggtcgtccgaattcgtgggactaaaaaagcgctcgcgatgacgacggattgtaacgggcgttacttatacctcgatccaaaagtcggtgggcaagtggcagttgccgaagcagcacggaatatcgttgcggcagggggccaaccactgggaattacggattgtttgaactatggcaatccggaaaagccagaggtattctgggaatttgatcaaagtgcccaagggattgcggcggcctgcgaggttttcgatacgccggtcatctctggtaatgtttctttttataacgaattcaatggcgaagcgatttatccaacaccgatgattgggatggtcggtttgattcgagatacagccgacatcacgacgcaagattttaagtcagcgggggatttaatctacctcgttggccagacggatacgaatttagcgggttcggaactccaaaatatgttgacgggcaaagttgcaggacgattaagcggcttttcgttagccactgaaaaagcgagtcaagattgcgtcttagcagcgattcaaaagggctgggtgactagcgcacatgatttatcagagggtggttttgcggttgcgttagccgaaatgacttttaaagaacaactcggctgccgcgtgcaagtcccccttaatcaacaacagttatttgttgaaacgcaatcccgctttatcatcacggttcggccagaaaatcagacggcgtttgaagcgttctgtcaagatcaggcgcaattaattgggacggtctcggccacgccaattatgcaagtgcaaacgactgaatcaactgttgagttatcggtgactgaagcgaagttaagttggaagacggcgataccatgtcaaatgaaataaaaagtttaaatgaagaatgtggtgtttttgggatttggggtagtccagaagcaaaccaaatgacttattttggcttgcatagtttgcaacatcgtgggcaagaaggtgccggcattgtcactaatgatcacgggcacttaatgggttatcgcaatcgcggtttgttggcggatgttttccgcaaaccggagcacttaacccaactaaccggggacgcggcaatcggtcatgtccgttatgcgaccgctggtagtcacggtttagaaaatattcagccgttcctattcgattttgcaaccgatcaattcgcacttgcacacaatggtaatttaaccaacgcggtcacactgcgccgcatgcttgaacaatcgggggccatcttaaaatcgagctctgattctgaaattctgatgcatctgattcgacgtgcagaagggcctgatttgcacgcgcaaattaagacggcccttcaacaaattcgtgggggctttgcctacctattattaacgcaagattcattgattgcgatgcttgatcccaacggctttcgaccactctcgattggacgtttagcaaacgggggctacgttgtggccagtgaaacctgtgcgctcaataccgttcaagcaacttttatccgagatgtgcagccaggcgaaattgtgacgattgatgcggacgggttacattctgacttcttcacaaccgaaaccacgcattcaatctgttcaatggaatatatctactttgctcgcccggattctgatatctgtgggattaacgtccatgcggcccgcaaacgaatggggaaacagttagcacgcgaaaccgcagttgatgcggatatggtaattggggtgccgaattcatcgttatcggccgctagtggctatgccgaggaaagtggtttgccgtatgaaatgggcctcgttaaaaatcaatacgtggggcggacgttcattgaaccaacgcaagcccttcgtgaacaaggggtaaaccgcaaactcgccgtggttaaaagtgttgtggctggtaaacgaatcgttttagtggatgactcgattgtgcgtgggacgaccagcaagcacatcgtgaaacgtttgaaagaagcgggcgcattatccgtgcatttgcggattgcgtccccaccattgaagtacccttgtttttatgggattgatattcaaacacgtgatgaactgattgccgcgcatcaaagtattgctgagatgtgtgccacgattggcgcggattcacttggctttttgagtgaacagggattaatcgacgcgattgggttacagcaagatgcgccgtattccggattatgtatggcgtatttcaacggcgactatccaacgccactttatgactatgaagctgcctatcaggcaagtttaaaagcagataaggagcaacaatcatgacaaatgcttaccaaaaagccggggtggatgtgacagccggttacgaagtggttcgtcggattcaaaagcaagtcggcgcaaccaatcaaaatattggtcgcttcggtggtcagtttgccttagcgatggggcagtatgaaaatccggtgctcgtttcaagtaccgatggggtcgggaccaagttgatggttgcttttgcagctgatgcacacgcgaccatcgggattgattgtgtcgcgatgtgtgtcaatgacattgttgcccaaggcgctaagccactttatttcttagattacttagcggctggtcaaacgcagccggataagatcgaacaaattgtcagcggcgttgttgcaggctgccaagctgctgacatgctgttaatcggtggtgaaacggccgagatgccgggtatgtatgctgaaaaacattatgatttagcgggttttgcagtcggaattgctgatcaagctcaattaattactggtgaaacgattcaaacaggggatgtattaatcggaatcgcgtccagtgggattcattcgaatggctactcacttgtgcgccaaattttcttcgaacaacatgggttgtccgtcgacagtcacttacccgaattgcctggtcagacactcggtgaatggctattaacaccaacgcggatttatacacaagcatgtcagccgtttatcgaacaaggttttattaagggcgcggcccacattactggtggaggctttattgaaaatataccgcggatgttgcctgacaacgtgatggccgaaattcaattgggaacatggccaagcttaccgatttttgcggcacttaaacaatatgggcaattggatgcactcgagatgtataacatttttaacatggggatcgggatggtcttagccgtcgcaccagaaaaagcggcacaagtcctcgcccaattgaacgctgaacaagaacaggcttaccgaattgggtcggttaaaccgcgacaagaaaatgcaatagaattggtgggttgatgagatgaaagtggcgatttttgcttctggaacgggttctaactttgaagtacttgcagatgatgacgccttaaaaaaagcgggcatggagattatgaatttagtgtgtgaccagccgggcgcaccggtgattgaaaaagcgcgccaacgaaatgtaccggtgacggtcatccgcttaagtgattatgatgatcgacaacactatgaagcagcaattgtcgcgctgttggcaccgttacagttggattatatattgctagcgggttatatgcgggtgattaccccagtattgttgcatacctacccacaacggattatcaatattcatccgtcgttactaccggccttttctgggttacgaagtattgaacgggcctatgcggcacaagtggctgaaacgggcgttacgattcactacatcgatgaaggtgtcgatagcggtccgatgattgtccaagcaaaagtaccattgttgcctggcgatagtttagccgcattggaacaacgcgtgcacgatacagagcacgcgatttatccgcaagttgttgctgaattaattaaaaaccaaaatagaaggagtaattcaatcaatgaaaagagcgttggtcagtgtttcagataaaacaggaattattgaatttgctaaaggattagtagcagctggttacgaggtgatctcaacaggcgggacattcaaggtattacaagaagcgcaagtaccagtaattgcgattgatgaagtcactcatttcccagaaatgttggatggacgggttaaaacacttcatcccaatattcatggtggcttgcttgccaaacgcgacgaaccaacacacatggccgctttagcagcccatgacatccagacaatcgatttagtttgtgtcaatctgtatccttttaaagaaacaattcaaaaaccagggattactgaagcgcaagctgtagaacaaattgatattggcggaccttcaatgttgcgttctgccgctaaaaacttcaaatcagtgtacgtggtcgttgatcaacaagattacgcgcaagtcctcgaacacgtcgtcgatgaggggcaagctgcagttgattaccgtcgttatttagcagccaaggcattccgccacacggcagcttatgatagcttaattgccggttatttaaccgaagcagtcggcatcgaattccctgaaaaattaacacgttcatacgactttaaacaagcgttgcgctatggggaaaatgcccatcaaaaagcagcgttctatcaaagcagtttaccaacggctttctcgattgcctcagcggtacaattacacgggaaagaattatcgtataacaacattaaagatgcggatgcggcggttaaagtggtcgcagaattcagcgaaccttgtgtggttgcgatgaaacatatgaatccgtgtggcgtcggcttgggtgcaaccatctatgaagcttggcaaaaagcctacgcggccgatccagtatcgattttcggggggatcattgccttgaatcgtgaagtggatgttcaaacagccgaagaattacacagtttattcttagaaattatcatcgcaccaagctacaccccagaagcgttagccattttagaaaagaagaagaatttacgcgtcatgacgcttgattttgaggctgctaagcaagcggatcgcttcgaaatggtttctgttttaggcggcttactcgtgcaagaacgtgatcgggtgactgatcaagcatctgaattgaaggttgtgacggacaaaacaccaacggctgatgaacaagctgcgatgttatttgcccaacgtgtggttaaacacgttaagagtaatgccatcgtggtcgcaacaaaggaccaaaccctcggcattggtgcggggcaaatgaatcgggtgggctctgtgaagattgcaatcgaacaagcggaagccaatggattaaaagcaccgttcgtcttagcatctgacgcctttttcccaatggatgacagcgttgaatacgccgcagaacatggtgtgacagctgttattcaacctggtggttcgattaaggatcaagattcaatcgacatggccaaccaaaaaggaatcagtatggtgacgactggtcgccgtcatttcaaacactagccaataggaggcaaatcatggatctattagtaatcggtagcggcgcgcgtgaacacacgattgcgcgtgcgctacagcagagttcaactgttgcaacggtctattgtttgccgggcaatccggggatgcaattggatgggattcaaacagttgcgattgagatgactgactttgcagcgatgattgcctttgcgcaggccaaaaaggtcgcctatacgattgttgggcctgaacaaccgttagtggctggcgtagtggatgcttttcaagacgctggattagcgatctttggaccgcgtaaagcagctgcggcattggaagggtctaaaactttcgccaaagaaattatggcggccgcgcatgtgccaacggcggcttatcaagcctatcagactgtccaagcggcactggatgccctcgatgacgttcgttatcccgttgtgattaaagcggatggtttagcggctggcaagggcgtcgtcatcgctcaaaatgacgtgagcgcgcggcaaactgttcaggcgttctttgaacagggcgtgccccagttattgatagaagattatctcgaaggtgaagagttctcgctgatggcgttggtggcgaataatcgcgtctatccattaccggttgctcaagatcataagcgcgcctttgacggggatcgtgggcctaatacaggtgggatgggcgcttattgtccagtaccccagattagtgaccaatgcgttgcagaagcggtaacgactattttagaaccgattgtggcaacgatggctgaacgtcaaacgccttttaccggtgtcttgtatgcgggcttaattgccacacaacacggggtgaaagtgattgagtttaatgtgcgctttggtgatcctgaaacacaagtggtgctaccacggatgacgggcgactgggcccaagtttttgcacaattattgaagggggaaaccccaacgttacagtggcaattatcaggcattacgttaggtgttgtggtggcttcagatggttacccgacacaatcgacaacgccgtttgttttacccactttgcaacaatttgcaaaacgcaacagcacatttagtttcgctagtgtcgcagaacaagccaatcaattggtcagcgctggcgggcgtttgtataccgctagttattctgctgagacgctaggccgagctagtcaacaggtctatcgggatttagcgcaactcgctttaccgacgactttttaccggcaagacattggatttcgaacgcaagtgaaataaccgagtataaatgtttgcttacttttgataagagaaccatgataaaggtattcaattattgaaagaaggaatctatcatgggatatcatacaagtgaagcggaaaatccaatcgatattttaaacttagcgtcgttagaaggacgcgtgaaagaacgaatggaagctggcgcgtttggctatatccgtggcggtgctgaagacgaatggacgatggctgaaaataccagtgctttcaatactaaaaaaataatgccccgtgtgttaaaaggcatcgatcatgctgatttacatactaaattatgggatattgatttaaaaacgccgattattcaagccccctcagcagcccaagggttagcacatgaaaaaggggaagtcgacactgctaaaggggtcgcagcggctggttcgattttctcaattagtacctatgccaatacattggtggaagatgcagccgcagcggctcctgatgcccccccaatttttccaactctatatgagtaaagatgatcaattcaatgagttcttattgaaaaaagccgttaaggcaggtgtgaaagccattattctcaccgtcgattcaacattgggtggttatcgtgaagcggacatcgagacgcaattccaattcccactaccaatgcctaatttagcagcttatagtaattctgacggtgctgggaagggcatctctgaaatttatgctgccgctaaacaaggattagtaccagaagatattcaaaagattaaacaaatcacaaatttgccagtctttgttaaaggcattcaatcaccagtggatgctgaaattgccattcaagctggtgcagatggcatctgggtttcaaatcacggtgggcgtcaattagatggcggacctgcttcgtttgaagtgttgcctttaattgcgcaacaagttgctaaacgcgtcccaatcgtttttgatagtggtattcgccgtggtgaacatgtctttaaagcactcgcaagtggggctgatttagtggccattggtcggccaattatttatggtttaaatttaggtggcgcccaaggggtacaatctgtttttgaacacttaaaccatgaattatcgattaccatgcagttggctggtaccaagacaattgatgaagtgaaagaaacaaccttacttgattaatatggtatactgagagtccttggcaggggcgctaaaaaaagcggttcaactcaatgatgagttggaccgatttttgacgttaacctaattctggatacaaaaatattaataaaaaatgcggaagtagttcagtggtagaacatcaccttgccatggtgggggtcgcgggttcgaatcccgtcttccgctttttttgtacccgtaataaaatagtttccgggaagtagctcagcttggtagagcactacgttcgggacgtaggggtcgcaagttcaaatcttgttttcccgactctcaaagacttgttgatgacaagtctttttttgtgcgtccaattgattagctactaaaagtcagtaaactttcattttgtactgataatcgttataataatagtcaacgttagtcaaagttaaacttttgacactgaaaaacgcagaagactaaatgaaggggctgatatgtttgcaaagtcagaacatctcggatattattgaagcctatctaaaaaagatactggctgacaatgaacaaatcgaaattagacgctccgaaattgctaagctttttaattgtgtgccgtcccaaattaactatgtgattaatacgcggttcactgagcagcgcggttatgtcgtgaatagtaagcgtggcggcggtggttatattcggatcgtcaaggttcaatttctcgatgatcgggactttttagaagcgttaattgaaaatgttgatacgcagatttcccaggcggacaccttagccattatccagaaactatatgatgaacaaattctttcgcaaaaggaaggcaatttgatactcgcggcaacgagtccacagacattagcggttaataataaacaattagaagagcagcttcgagcacagattctagttgcagtgttagaacgactacgatatgaaattaagtaaagagtgggggattatccatgaataatctatttacaccaagtgcaaaaaacgtcttaatgatggcacaagaacaagcaaagaaatttaatcaccatgcactaggaacggaacatctcctattagcaatcgtattagaaaatgagggaattgctgggactaccttacgcgaattaggtgtcaattcgaccgatgtccttgaagaaattgaacgcttaaccggatatggcgatgctgtaatcgcttctggcattagcggttatttaccatattcgcccaaagccaaacaagtactcgatattgctcgggttgaagcgcaacaagctaattcggttaaaattggcacagcacacctattattagcacttttacgtgatgatgatattatcgctgcgcggatcttattgaacttaggacttagtttagctaaaacacgccaactactacttcaaaagatgggtgtggatacagcaaccgctaaaaaacgggctaaagcagctaagaataatgccgatcaagctgggacaccaacgttgaaccaattagcgcgcgatttaacacaacttgctcgtgacaatcaaattgatccggtcgtgggtcgtgatgaagaagttcggcgacttgtgcagattttagcccggcgttcgaagaataatcccgtcttagttggtgaacctggtgtcggtaagacagcgattgctgaaggttttgcgcaacgcatcgtcaatggcgatgtgccaagtgacatgcagcaaaagcggctcatgatgctcgacatggggtcattggttgctgggacaaagtatcgtggtgaattcgaagatcgtttgaagaagattatcgatgaaatctatgcagatgggcaagtgattctctttattgatgaattacacaccctcattggtgcaggtggcgctgaaggggcaattgatgcttctaatctcttgaaaccagcattagcgcgtggtgaattacaattaattggtgcgacgactttagatgaatatcaaaagtacattgaaaaagatgcagctttagagcggcgattcgcgaccgtcacggtcaatgaaccaacgccagaagatgcggaacaaatcttaaagggattacgtccacgttatgaagctcatcatgggattgcaatttcagatgaagctttacatgaagcggttgtcttatcaaatcgctacatcacgaaccgattcttaccggataaggcaatcgatttaatggatgaagcgacggctaaagtgcgattggatgctgttaaccagaagacaccgttggataaattagaacaaaaactacaaactttaaatgacgataaagaagccgctgttcgcgcgcaagattttgaaaaagcggcgacgattcatgagcaagaagtaaccactaaggccaagattgccaagttacaagctgccgaacaagaaaacggtgttcgcagtgacattcaagtgactgctgaagacatcgctcaagtggttgcgcaatggaccggtgtgcctgttactcagttgcaacgcaaagaaagcgaacgtctcatgcaacttgaaaaagtcttgcataaacgggttgttggccaagaagaagccatttctgccgtttcacgtgcgattcgtcgtgcgcgcagtggtttgaaagatccaaaacgaccaattggttcatttatgtttttaggcccaaccggggttggtaaaacagagttagccaaagcattggcggaagccatgtttggttctgaagacaacttgattcgggttgatatgtctgaatatatggaacgttacagcacgagccgtttagttggggcggcccctggctatgtcggctacgaagaaggcggccaattaacagaaaagctccgcaataaaccatattccgtcattttatttgatgaagttgaaaaggcccaccctgatatcttcaatatcttgttgcaagtcttggatgacggctatttaaccgattcaaaaggacgtaaggttgatttccgtaatacgatcatgattatgacatcaaacttaggtgcgacagccttacgtgatgataaatccgttgggttcggggttaaagatgtaactgctgattataaagcaatgcaagggcgcattatggaagaattgaagaaagctttccgtccagaattcttaaaccgaattgacgaaacggttgtcttccattccttaacacaacctgaattgcgcgaaatcgtgaagattatggcgaagaatgtcttgggccgtttagcggaacaagggattcaaatcaagatgacagctgcagcgatggatgttgttgccaaagctgggttcgatcctgaatatggggcacgaccaattcgacgggcgctacaaacccaagtagaagatcagttgagtgaagcgttgcttgctggcgagattacgatgggtgtaccggtgacaattggcgcaactaaaggtaaaattaccattaccagtaagactgataaagtaactgtttaaacgtaaataaggtgtcagaccaattggtctgacaccttatttttttgccctaaaagggtcgtgagctgttcaatttcagttttaatcgcagcgccgatattcgtttgactgacacgttgacgttgactaacttgatcaatcactcgacgcgtggaaataatgtcttgcatcttggcaattgcattggctcgtgtggtgaacggctgatgggtgactaactgcattccatacgaattgtacaggagcgtaaagccaccaatgccagttgtgtggtgataagcttttgaaaagccgccatcaatcacgatcattttgcgattagccatgattggattgtggccttttttgacaggtgtgtgaccattgagaatgtgccccgtttctggcgttaagccaaactccaacaagagtttctcaatgaagtcttcctgatggcggagttggtaatatgcgttcttcttttcttcgtgtaaaacggggtcggcgctgaagtagcgttcgaaggtcgtcatcgcgttcttgccaaatagtggggagagcggtcctgtccacaggtaccagagtaaatcggtggataaattatcttgattgagcgggtggtcgaagctcattcgaatttggtgatcgaagaagtcgagtaatgatttaccagcgtattgtcggttagcgagggttaacgtgaggaagttgccggcttcatcaactggaatacagccgtgaaaaaggagattctggttgtagagttggtacatgctaccgttgtcgattaaaaaacgcagatgcttgcgtagtttttggcagtgggtaaacgcgtttagcaatgatgtaacaatggctgcttcaccggaagttaatatttctgggtgggtggggtcgactgtttgaaagcaggtgttatcaagtgggtagtcatgaccatttagatgaattgtctgctgttcaaagtcaacatggctgagggttaagcggtggtccattttgaaatcaggattgcgtttaatcacggtttgttccaacttaaactgcatgatggcgatggcttggtgcacttggttgatgcttttcttttcagctgttgagattgcgggttgattggcagcaacctttggttcgaaggcgggattgggctgataagttcgttgggcaaactgaaccagttcgctaaggtcaattccgtaagctttctcgatgatggctaaattattgtagcgtgcgcaaatgcgtaaaaggttgagcatacatagttgagaaccgctagcggcgccgaaccagagaatatcatgattgccccactgaatatcaaccgcggggagcttggtgagttgttcgacaatcagatcgggacgcggcccacgatcgtaaatgtcaccgatgatatgccaatgatcaaccactagtcgttgaatcgtatgactggtggcgataattaaggcatcggcttggcccatcgaaatgatggacgtcgtgatttcttggaagtagcgtttcttatcgctgttagctacatcgccgtacattaattcttcggtaatgtagacgaaatcgggcgccattgctttacggacttttgagcgtgtgtattttgtggagacaaattttaagaggtcgattaaccgtttaaaagtggtgaggtaccactgatcgagttcgctagcagatagttgtgcgtgtttgagtgcaagccgctcggttgggtagtaaactaaaaaagcgaacgcctgcattgtgtcttcagtcatttcaccggaaaagacctctgcaattttttgccggagattccctgcgccagtgcgaatgagatgctggaaggcatcatattcgccatgtaaatcactcatgaaggcttcagtgggtttggggaggttcaagatggcctttaagttgatgatttcggaagtaattgccattttagtggggtatttttcggataacgttttcattttattgttaatcattcaccaaactcctttgataaactaatagttcgattataccaatcataaatataaatgcaaattactttgtttaaaagctttttattagtatataccaattaaaaagtcgcgcagtttagcgcgacttctggaaactattgatcttggatggtgccatcaacgtggcgctcaactttcatttgcgtcattgggatgtagcccagtttagggacgattgtcttttgaacgtcttttgattggatgaagtggatgaaacgggctgtttgatagttaggtgcgcccttagtatacatatgttcgtaagaccagattggccatgcattggttgaaacgttcttttcggtaggctcaacgtcgtttaacttaacggcttgcaagttacctttgatgtatgggaaggcgaggtaactgatagcgcctggcgtttgttcgacgattttttgaacagtcccagaggaatcttgttcttggctggtaacaactttgtcggttttaagacctaatttttcaaacgtttgacgtgtcccacttccttgggcccggttgataacggtgattttttcgttaggaccaccaacggattgccagtttgtgatttcgcctttaaagatgcctagcaattgtgcactggttaaatttttgatgcctaactttttattaacaacgggtgcgattgcaaccacagcaactttgtgatcaacaagtttcttagcatcgataccatctttttcttcagcgaagatgtccgagttaccgattgtgacgttgccaccactaatttgggttaaaccagttcctgaaccgccaccttgaacggtgacgttgactttagggttatccttttgatattgatcgccagcttgctcaacaaggggttgaagggctgtcgaaccaactgcagtaattttagcgccttgatcctggctttgacttgcactttttgattggccttgacaaccagctaataaaagagcggccgcaccaactgtgagtaatgccatactaatgcgtttcataatgattcctcctgaggactgatttaagggtacaagttcagtatagagacgtcgtgtaaagattgaccgctaattcgtgtaaaaaacgtaaatgataagtcgcgagtttgtaaatgattccgtgaggggcttgaagattgtcattagagacttttgttaaaagggtgggtaggcgatacagccataaaatgctatgattaaatgagatagttagaaatggagcaaatacataatgttatttattgcgatgatctacttgtttgtctgtttaccttttttatgtgctattgtccaacgcaatgatcgccaatttattcaattagttggtatgttgatcaatttggtgcttgtattaggattaacgattttagtgacttttgggttgactggtcatgttattcattttagtgatggtttgttccaaaagttatttttactcaagtttattatgttgattaccattattcaaggcgtcgtgttggtgacaagaaggtggcgccaaaaatggttaatatttgaactggtaccagtcacacgcacaagacattggtttagctggtggatttttagtggtgccttattaatatcagttgggtatttcttgttgtcagctagtttttggacaaaggcaaattttggcttgttaacgcccgagcagatagtttataacttacgccaaccgatgacaggtgttgacgatggttttattaattcatttatcggcggtccggtgctaggtgccattacttgtttaatcagcgtttttttgttctgcaactatatcagacacttgcaactgttggtcactcataaaataacacaccacttagaactcaaggcaaaacgatttgtattggtcagtgcgttattgttttgtggtttgacgacggttgctgcgattaaaattgatgctgttggtttttacgaatatctaacggcgaattcaccatttattgaagaaaattatgtagcaccgaataaaaccaaattaacgttcccaaaacaaaaacgaaatctaatttatatttatgctgagtcactcgaatctacagcaacatcaagagaaatgggtgggcagatgaaaaccaatttactaccagaattgacggcgttagctgagcaagagggtgttcacttctcaaattctaaccgatcatttggtggtgcccaacaattaccaggaacaggctggacagttgcgggaatggtcgcccaaacatcaggattaccgttgaaagtgccggtggatgggaattcctatgcgacagataaaaagaatcatttcctaccaggcgtcacgtcattaaataatattttggacaagcacggctatcagcaaaaaatcttgcttggatcggatgcgacttttggtggtcgacgatcatattttacgcagcacggtaatgttcaaattgatgatttgttaactgcgcgtaaagatggtcggttacctgaagactattatgtttggtggggctatgaagattcaaagttattcgaatacgctaaggaaagtgcgttggagcttagcaaatcagatcagccatttaacttaacgatgctaacggagaatacgcaccacattggtgggtatccagaaccgaatatgccagaaaagtatggtgaccagtattcaaacgttatcgccttttctgatcatcaaattgttgaatttattaagtgggcacaaacgcagtcgttttatcagaatacgaccatcattgtcaacggagaccatttaggcatggatgtggagtattataagaagattccggccaataaacggcatgcatttaatttgattttaaatgcaccaaaagcaagtcaggttcaaaccaagaatcgccagtttagcacaatggacatgttcccaacgacgctcgccgcaatgggggttgatattaagggagaacgtttaggcttaggaactaatctattttcaacgaaaaagacattaatagaagaaaagggattgaaaaaggttgataaggccttgagcgccaaatctaaattttataataatcaatttatctatgataagtagtaccgaggcagattattgacttttagtagtaaaagaagtatattatacagtaactgcgaaaatccgtagaaaaatttattgtgctgatctattgtccagcacggtattcatgaaaaacaaaaatagttagtctgatttattcagcttaaaataactgtttttgttttttttctgctcaaaattatcaaaaaatggcgatgtaatattttcttaatatttgtcatatttttgtaacaatgaggctgcggaaaacttatagaggggtgaacaatttggcaggacacttagtgaattacggtaaacatcgtactcgtagaagctacgcacggattaaagaagtgctagaactaccaaacttgatcgagatccaatctaattcctatcaatggtttttagacgaagggcttcgtgaaatgtttgatgacattatgccaattgacgattttgctggtaacttatcattagaattcgttgattaccaacttcttgaacctaaatacacggttgaagaagctagacaacatgatgccaactactcagcaccattacacgttactttgaaattaacaaaccatgaaactggtgaaattaaatctcaagacgttttctttggggacttcccattgatgactgaccaagggactttcatcatcaacggtgctgaacgggtaattgtttctcaattagttcgttcaccaggcgtttatttcaacagcgctgttgataaaaacagccgcacaacttatggtacaactgtcattcctaaccggggtgcatggttagaatttgaaacagatgctaaggatattgcatatgttcggatcgatcggacacgtaagattccaatgtctgttttagttcgtgctttaggttacggttctgatcaagaaattatcgatatcttaggcgacaacgattcattaatgttgacgttagaaaaagatatccataagaatactgacgactcaagaacagaagaagctttgaaggatgtctacgaaagacttcgcccaggcgaaccgaagacagctgatagctcacgttcattactttatgcacgtttcttcgatgctaaacgttatgatttagctgctgttggtcgttacaagatcaacaagaaattaagcttaaagacgcgtttattgggtcaaacattagctgaaacacttgctgatcccgatactggtgaagtgattgctgctaaagatacagttgttgatcgtcaagtgatggatgctttggcaccatacttagacaaagaagacttcaagacggttacttaccaaccatctgatgaaggtgtcttaccagaaccaatgacactccaagtgatcaaagtgtactcacaaaaaacacctgataaagaaatcaacttaatcggtaacggtcatatcgatgccaagattaagcatgttattcctgctgatatcatcgcttcaatgaactacttctttaacttacaagaaggtctcggttcaacggatgatattgatcatttagggaatcgtcggattcgttcagttggtgaattgttacaaaaccaattccgaattggtttatcacggatggaacgtgtggttcgtgaacggatgtcaatccaagacacaagcaccgtgacaccacaacaattgatcaatattcgcccagttgttgcctcaattaaggaattctttggttcatcacaattgtcacaattcatggatcaaaccaatccccttggcgaattgacgcataaacgtcgtctatctgccttaggacctggtggtttgactcgtgaccgtgccggttatgaagttcgagatgttcactatacccattatggtcgtatgtgcccaatcgaaacccctgaaggccctaatatcggtttgattaacagtttggctagttacgctgttgttaaccgttacggcttcatcgaaacaccatatcgccgtgttagttgggatacgcatgatgttactgataagatcgactatttaacagccgacgaagaagataactatgtcattgcgcaagccaactcaccattaaacgatgatggttcattcgttgatgatactgttttagcacgttacaaagatgacaatattgaaacttcaatcgacaagttagattacatggacgtttcgcctaagcaagtagttgctgtcgctacggcctgcattcctttcttggaaaatgatgattcaaaccgtgccttgatgggtgctaacatgcaacgtcaagctgtgccattagttgacccacatgcaccacttgttgggacagggatggaatataaagcagcccacgattcagggattgctttattagcacaacatcccggaactgttgaatacgttgatgcgaaagtgattcgcgttcgtcgtgaagacagctcattagatacgtacgaattaatgaaattccgtcgttcaaatgctggtaagaactacaaccaacgtccaatcgttgcaaaaggcgatcacgttgatgttgatgaaattatcgctgatggaccagctatggaaaaaggtgaattagccttaggtcaaaacccattgattgctttcatgacttggaatatgtataactacgaagatgcgatcgttctttcagaacgtttagtgaaagaagatttatatacttcaatccatattgaagaatacgaatcagaagctcgtgatacaaaacttggacctgaagaaatcacacgcgaaattcctaacgttggtgaagattcattgaaggatcttgacgaattcgggattgtccgtgttggtgctgaagtcaaagatggcgacattttagttggtaaggtaacgcctaagggtgtgacagaattatcagccgaagaacgcttattgcacgctattttcggtgaaaaggctcgcgaagttcgcgatacatcattgaaagtacctcatggtggcggcgggattatccaggacgttaagatctttacgcgtgaagctggcgatgaattgtcaccaggtgttaacatgatggttcgtgtttacattacacaaaaacgtaagatccaagtcggcgataagatggctggtcgtcatggtaacaaagggactgtttcaatcgttgttcctgaagaagatatgccatacatgccagatggtaccccagttgatatcttattgagtcccatgggtgtgccttctcgtatgaatatcggacaagttcttgaattacatcttgggatggctgctagaaacttaggcatccatgttgcaacaccagtctttgatggtgcgcaagataaagatttatgggacgctgttcgtgaagcaaacatgccttctgatggtaagagcattctttatgatggtcggaccggtgaaccattcgatacacgtgtgtcagttggtgtcatgtactacatgaaactagcccacatggttgacgataaactccatgcacgttcaatcggaccttactcacttgttacgcaacaaccattgggtggtaaagctcaatttggtggccaacgtttcggtgaaatggaagtttgggctcttgaagcttacggtgccgcttataccttacaagaaatcttaacttacaagtctgatgacgttgttggtcgtgtgaagacatacgaagcaatcgttaagggtgaaccaattccaaaaccaggtgttccggaatcattccgagtattggttaaagaattacaatcacttggcttggatatgaaggtcttggatatcgataatcaagaaattgaattacgcgatatggacgacgatgatgatgatatcgaaaacatcgatgcattatctaaatacgctaaagaacaagaagccaaaaaggcacaagaagaagctgaaaaagcacaagcagcaaatgctgatgcagtagatccatctgctgaataaagcgtgctataaattatgaggaggtcggccctttgatagatgtcaataagtttgaaagtatgcaaattggtttagcatcttcagataaaatccgtagttggtcgtatggtgaagttaaaaagccagaaacaatcaactaccgtactttaaaacctgaacgtgatggcctttttgatgaacgaatcttcggacctacgaaagattgggaatgtgcttgtggtaagtacaaacgaattcgttataaaggaattgtctgtgatcgttgtggcgttgaagttacacgttcaaaagtgcgtcgcgaacgcatgggacatatcgaacttgcagcaccagtaacacatatctggtactttaaagggattcctagccggatgggtcttgtcttagacatgagccctcgtgcattggaagaaattatttacttcgcatcatacgttgtgattgatccaggcgatacagccttagaaaagaaacaactgatgaccgaacgtgaatatcgtgaaaaattagatgaatacggtaatcgttttaacgctaagatgggtgctgaagccatcaaagaattgttacgtgacgttgatcttgaaggcgaagttgctgaattaaaggaagacttgaagtcagcacaaggtcaaaagagaacgcgtgctatccgtcgtttggacatcttagatgccttccgtaaatcagggaataaccctgaatggatggttatggatgctattccagttattccaccagatttacgtccgatggttcaattggaaggtggccgttttgccacatctgatttgaatgatttgtaccgtcgtgtgatcaaccgtaacaaccgtttgaaacgcttgttagacttgatggcaccaagcatcatcgttcaaaacgaaaaacggatgttacaagaagccgttgatgctttgattgataatggtcgtcgtggccgtccagttactggacctggtaaccgtccattgaagtctctttcacacatgttgaaagggaaacaaggtcgtttccgtcaaaacttacttggtaaacgtgtcgattattctggtcgttccgttatcgatgttggtcctacattgaagttctatcaatgtggattaccacgtgaaatggcacttgaattgttcaaaccattcgtcatgcacgaattagtgaaacgcgatatggcttcaaacattaaaaatgcaaaacgtaaaattgatcgtcaagatgacgatgtttgggatgttttagaagatgtcatcaaggaacgcccagttctattgaaccgagcacctacattgcatagacttggtatccaagcattcgaaccaatcctggttgatggtaagtcaatccgtcttcatccattagcttgtgaagcttacaatgccgatttcgatggggatcaaatggcgatccacgtacctttatctgatgaagcacaagcagaagcaagaatgttaatgcttgccgctcaccatattttggcaccaaaagatggtaaaccaatcgttacaccttctcaagacgttgttttagggaactactacttaacgcttgaacaaaaaggtagtctcggcgaaggcatgatcttcaaagatacaaacgaagttttaatggcttatcaaacaggtcacgttcatttgcacagtcggattggtttgtcagttgttgatatggataatcgtccattccctgacgaacaacgccacaagattatggtaacaagtgttggtaaagtgatgttcaacgaaatcatgccaactggcttcccatatttgaacgaaccaacaacagataacttgatgaatggtgtgccagataaatacttcatcgataacggtgaagatattcatgactacctctcaagtgccccagtgatcttaccatttaagaaaggcttcttaagtgatatcatcgcgcaagtcttcaaggtatataaggttcaacggacatctgacttattggatgatatgaagaccttaggttacgttcaagcgacccatgctggtttaacagttggggttgccgatgttcctcaattacctgaaaaacaagaaattgttgatgaagcccataagaaagtcacaacggtttctaaacaattccgtcgtgggttgattacagatgaagaacgccatgcgcgcgttattgaaatctggaacgatgctaaagacgatatccaacaacgactcacagattcgtttgatccaacaaacccaatctcaatgatgtctgattctggtgcccgtggtaacatctctaactttacgcaacttgctggtatgcgtgggttgatggctgctcctaatggtgggatgatggaagttcctgttacatcaaacttccgtgaaggcctctctgtcatggaaatgtttatgtctacccatggtgcccgtaaagggatgactgatacggcgcttaagactgccgattctggttacttaacacgtcgtttagttgatgttgctcaagacgttatcattcgtgaagaagattgtgggactgatcgtggtcttctcattcactcaattcgcgaaggtaatgaattaatcgaaccattgtatgaccgtcttgttggtcgttgcgcaatgaagaccattgttaacccaacaacgggtgaagtgatggttcaacgtaaccaattaatggatgaacaacttgctcaagctgttgttgatgccggtgttgaagaagtcacaattcgttctgtcttcacatgtaacacaaaacacggtgtctgcaaaaaatgttacggtcgtaacatggccaacggcgaagaagttgaagttggtgaagcagtcggaacagtcgcagctcaatcaatcggtgaacctggtacgcaattaaccatgcgtaacttccataccggtggggttgccggcggtgaagatatcactcaaggtttgcctcgtatccaagaaattttcgaagcgcgtaatcctaaggggcttgcaacaatcactgaagtaactggtgaagttgttgcggtggaagaaaaccctgcagaacatacacgtgaaatcactgttcaaggtgaaacagatacacgttcatatagtgtgccttacacagccaacgtcatcgttaacgaaggcgacatggttcgtcgtggttctaagttaacgggtggttctgttgatcctaaacaattaattaaagtccgtgacgtcttatcaactgaaaactacctcttgcatgaagttcaaaaagtttaccgtatgcaaggtgttgaaatcggcgataaacacgttgaagttatggtccgtcaaatgctacgtaaagtccgtgtcatggatccgggtgatacagaaatcttacctggtacattaatggatattagtgaatttacagaccgtaaccacgaaaccttaattagcggtggcgtacctgctacttgtcgtcctgtcttgcttggtattacgaaagcatcattggaaacaaatagtttcttatcagccgcatcattccaagagacaacacgtgtcttaacggatgcttctatccgcggtaagagcgatccattacttggtttgaaagaaaatgttatcatcggtaagattgtcccagctggtactggtatggcgaagtatcgtcatatggaacctaagacagtcggcgctgtatcagaaaatgtctactcaatcagtgacatcgaagcacagatgaaagaagaaacaaaagaataactgagtgccaatttagaacagttgctctaaattgcacgttaaagggcctcaccgacatggtgaggcccttttttatgtgtttgcaataaacaaaacgattaagacaccgtagctgatatacgggacaaatggaattgggcggcgtccgactaaggcgaggacaactggatggtggagactatcaatgagatatttgattaaacagaggagacaggcaattaataacatggatagggtgacctccaatccaaaccacaacccaagaattgccaataattcaatgtcaccagtaccgatgccatctgaaaagtagttgatgacagataaggtgctgccaatcaatagggcactgagccaatggtttgtcggccagtagtcaataaacaaaggcataaaagccagtaccattggaactgggtatagagctgtatggaaaatatcgactaggctcaacaaataaaggataagcaataaatagccaatctgtggtgtgaaatattgactggctaaacaacacgctaacaagccgccaataacctcactagtaaaaaaatggtgctggattcgagtatcacaatagcggcagtgccctctgagaatgaggtaactgataattggacataagtcgtaccaagcgagggcgtgatggcagaagtcacaccgtgaaccaggccatgtgatggataaaccgagtggccaacgccaagcacaaacagttaaaaaagaggcgcaacacgcgccaataacaaaggttaaaaaatatattaacaaacgtgtcatctcctttatgataactacaaaaaaagggcgcaactttttctgaaaaactggcttatagcacgttgactttcgtagttgtgcatgctattcttgtagatgtgctttttacggaagttttctgatattcagacatgctgactgacgtctaaaaatgcattacaatccacgcaatctaggttgccatttttttatcgtaaaaaaagaaccacctggatgtgtggacttaaaactcaaaaataactttcagatcaaggaaggaggaaccttcaaatgccaacaattaaccaattggtacgtaagggtcgtaaatcaagaacttcaaagtctgatgcacctgcattaaactttggctacaacagtatgaagaaaaaagctacagataatccagcaccacaaaaacgtggggttgctactcgtgtgggtactatgacacctaaaaagcctaactctgctttacgtaagtatgcgcgtgtgcgtttatctaacttaatcgaagttacagcttatattcctggtattggtcataacctacaagaacatagtgttgttcttatccgtgggggccgtgttaaggatttacctggggtacgttatcacgttatccgtggtgctttagatactgccggtgttgacggtcgtatgcaaagccgttctaagtatggtactaagagacctaaaaaataacacacaaaaaaatttgaaaaagtcgattgaagtttaaatgacactgtgtgttacttcaaggacttaaatatcttgaggaggttatcaggatgccaagaaaaggctatgttgcaaaacgtgacgttttacctgatccaatgtacaattctaaattggtttcacgcttaatcaaccgcttaatggttgatggtaaacgtggtactgcgtcaacaatcttatacgatgcatttgatattattaaagaagaaactggtaatgaaccattagaagtgttcgaagaagctatgaacaacatcatgccagtacttgaagttaaagctcgccgtatcggtggttctaactaccaagtaccaattgaagttcgtccagaacgtcgtacaactttaggtttacgctggttagtaagctatgctcgcctacgtggggaacataccatggatcaacgtcttgcacgtgaaatcatggatgctgccaataacactggtgctgcagttaagaaacgtgaagatacacataaaatggctgatgccaaccgcgcatttgcacattatcgctggtaagattaacaaggttggctgttatatgtattcaaatcatataatggcctcttgttgtatatagcttaatattcgagaggagtaatattcacttatggcaaacaaacgtgaatttccgttagacaaaacgcgtaatatcggtatcatggctcatattgatgctggtaagacaacaaccacagaacgtatcttgtactacactggtaaaatccataagatcggtgaaacccacgaaggggcttcacaaatggactggatggaacaagaacaagaacgtgggattacaattacatcagctgctacaacagctgaatggaaaggtaaccgagttaatatcattgatacaccaggacacgttgatttcacaatcgaagttgaacgttcattgcgtgttttagatggtgcaatcactgtcttagatgctcaatcaggtgttgaacctcaaactgaaaatgtttggcgtcaagcaactacttatggtgttccccggattgttttcgttaacaagatggacaaacttggtgctaacttcgattactcaatgacaacattggaagatcgtttacaagctaatgcacatgctgttcaaatgccaatcggcgctgaagatgaattccaaggcgttattgatttgatcgaaatgcaagctgacatctatgatgaagatgaattaggtgctaagtgggatacagttgatgtacctgctgactaccttgaagaagctacaaaacgtcgtgccgaattagttgaagctgttgctgatgttaatgacgacattatggacaaatatttagaaggcgaagaaatttctaaagatgaattgaaagctgctattcgtcaagcaactatcgatttgaaattcttcccagttttcgctggttcagctttcaaaaataaaggtgttcaaatgttaatggatggtgttgtagattacttaccatcaccattagacgtacgtccttataacgctaaaaacccagaagatgattcagaagttgaattgatggctggcgatgacaaaccatttgctggtttagcatttaagattgctactgacccattcgttggtcgtttaacattcttccgtgtttatactggtacattacaatctggttcatacattttgaatgcaactaaagacaaacgtgaacgtgttggtcgtttattacaaatgcattcaaatcaccgtaacgaaattcctgaagtattctctggggatatcgctgctgcaatcggtttgaagaatacaacaactggtgattcattgactgacgttgatcatccattaatcttggaatcaatggaattccctgacccagttatccaagtttctgttgaacctgaatcaaaagaagatcgtgataagttagatcttgctttacaaaaacttgctgaagaagatcctacattcaaggctgaaaccaacaatgaaacaggcgaaacgcttatttctgggatgggtgaattgcatttggatatcatggttgatcgtatgagacgtgaatttaaagtggttgccaaaattggtgaacctcaagttgcttaccgtgaaacattcacaaaacaagcatctgcacaaggtaaattcgttcgtcaatccggtggtaaaggtcaatatggtgatgtttgggttgaatttacacctaacgaagaaggtaaaggcttcgaattcgaagacgctatcgtcggtggtgtggttcctcgtgaatacatcccatcagttgaacaaggcttgaaagaatcaatggcaaacggtgtcttagctggttacccattgattgacgttaaagctaagttatatgatggtagttatcatgatgtcgattctaatgaatcagcatttaagattgctgcatcaatggcattgaagaacgctgctaaacaagctggcgctgaaatccttgaacctatcatgaaggttgaagttattgctcctgaagaatatcttggcgatatcatgggacaagtaactgctcgtcgtggtgctgttgaaggtatggaagcacgtggtaatgcccaaatcgttaatgcaatggtaccattgtcagaaatgtttggttatgcgacaacattacgttcagctacacaaggtcgtgggacatttacaatggtatttgaccactactcagctgttcctaagagcatccaagaagaaatcatcaagaagaacggtggccaataagccgctaatcttaagtgattggtttcgattggaaaaggactcgtcattgcgacgagtcctttttttgtgcgtaaaaatgcgattttacagtttcgtaaatgaaagttcatatttaattcataactggttggtattctgtatacatcagatgaattcctcccaagaaataatctgaaaaggtaaaaatgcttttcaaggtggttagcttttgagcataacatagcgaggataatgagcaacgaaggtgatcgttgtcttcgcgtagttaggcggaaaaagttaccttgaaaagcaagattaaatgaattttcattagacaattcctccctaaagaatccgtctaagtaaagcaccaccaatgagttatagtttaatggtaaaacgaaccggcccatttgaaattcctcccaagaacagtgaatggttttctggtgattgatagagacttgctttcgaaggcgcaaggatttgttgatcattaagactggttcatgcgggttcaatccccgctaactcgatttgccaccgccctggcaaaaaaactcaaactctttttcatataaacttctccaaaaaagggagttacgacaaaaatcacttttgtcgtaactccctttttgtgtttctaggcacggcttactgagttagttttgttttgtaggacgtgttttcaaactgcccatcagacgtttaacctttgcttgttcgatttcgcgggcggatagttgactatagtccgcttcgatagccagtttattgaaatcagctagccgttcaggcattaatgaacctgcatcgattgcggctcgtacggcgcaaccgggttcgctttgatgctggcaatccttaaatcgacagtcctgtgcgagcgtctcaatatcagtaaagactgtcttgagtgccttagacatgctacttgtcatgccgagttcgcgcatgccaggagtatcgacgatgaaggccccgctagcagtttgacaggcttgtcgattggtggttgtgtggcgccccttatcatcgtcagcgcgaatgccgctcgttaaaacggaaggctctttaatgagctggttgatcagggttgatttaccaacgccggatgagccgacaaatgtcacccattgtccagctgttaaatacggtttgaaagtcgctgcaacatttgatgccgtctggccagttgtgatgacgggaacgctgtcgaatgtcacacttgcgatggcgtcaagaaaggttgttagctcagagtcgctgactaaatcggttttactcaaaacaatcaccggtgttgcgccgctatcccaagccatcgttaaatagcgttgtaagcgcgcttcgctgaattcttgattggcggatgttacgatgaaaatcgttgcaatattggccgctaaagtttgaatccgttgttgcttattactgttgtgtcgttgaataagcgtgtgccgggggagatgtccttggatttggaaataatccgtatcatagatcacgccggttacttgatcaccgacaacgggcaggtcgttagtgctttctgccaagtggcgataccgaccgctgattgttgcggttaattcttgatgattgagtaggactttgtaatggccttggctttgaaaaattaaaaaagctgtttgttgtgtttgcatgatgatgcgcctccagtgtgttatttcatgatgatctaaatgaaataatggcggcactggctatctaagcagcgaataccgccattgatagcacaattgctgtgtttgtttttaacataaaaagaatctcctttatatagaatgggtacattgtcccgtcatttaagataacagatgatcgttaaaagtcaaattagataattgtagctccgaggctgtttttaaaatgcgcgagtgcccattcttgcccgttcggtgtaaaagttgcgacagcagcggctggaattgttagtgggtaatttaagttgtatgccgagactgcagtgtggagcacgcaaatgtcggtgcaaacgccagtcagtgttaacgcgtcaatctcgcgctcgcgtaagaaattatccagattagtgttagcaaatgctgaatagcgattctttgcaaatgcatagacgtgaggatcggtttggtgcttggtgtaccagctagctagtggtccgtaaaactcatggccccaagtattggctagattatgtggtgggaatagggcgctctctggatgaaatggatcatccttgacgtgtaaatcagtcggtaagatgacgtaatcaccggctgctaggaactggttagctaattcgataattacaggaacgattttctgagcgggtttgccggctgtcagagcaccgtttgggtcaacgaagtcatttgtatagtcgataatcaaaagtgcgttatgggacatgataaggacctcctggaggggatttaagttgctttcagtgtatcaaaacatggctagaaatccacgaatgacgcttgctacaagatttatgaaaatgttatgaaaaactttgataaatcagcaaaaaagggttgcgttatcgggttgtatcttgtaagatagataaagtgctatttccatagcaggagtgcgcaccatggtagtcaaaaagattaccgagtagctaagatgtgagaggttgcgacacacccggccgctttgccatgggcgggcgtgccggaaaaattttcacggagctagtctacttttaaaatagacgaaggagggaaaaacatggcaaaacaaaagattcgtattcgtttgaaagcattcgaacaccgtattttggatcaatcagctgacaagattgtggaaacagcaaagagaacaggtgctactatctctggcccaatcccattaccaactgaaagaacactttatacagtgcttcgttcaccacataagcataaagattcacgtgaacaattcgaaatgcgtacacacaaacgtttaatcgatattgttaaccctacacctaagacagttgattcattgatgaaacttgacttaccaagtggtgtagatatcgaaatcaagctttaattcgtaccaaccaattaaaaatactagaaaagaggtgttaccatgaccacaaaaggaatcttaggtagaaaagtaggtatgacacaagtctttactgaaaacggcgaattaattcccgtaacagttatcaaagcaactccaaacgttgttttacaagttaaaacaaacgaaacagacggctatgaagccatccaagttggttttgaagataaacgtgaagtcttgtcaaacaaacctgctaaaggtcatgtagcaaaagcaaatactactcctaagcgcttcattagagaattcagagatgtcgcattaggagattacgaagtaggaacagaaatcaaagttgatactttcgcagccggcgacgtcgttgacgttactggtgtaacgaaaggtcatggtttccaaggtaacattaaaaaagacggacaatcacgtgggcctatgggtcacggttctcgttaccaccgtcgtcctggttcaatgggtgctgttatcaaccgtgtcttcaagggtaaattattacctggacgcatgggtaacaaccaacgtactgttcaaaaccttgtggttgtaagtacagatgttgaaaagaacgttatccttgttaaaggtaacgtgccaggtgctaaaaactcaatgattacaatcaaaacagctgttaaagctcgtaacaaataatctgagaagggaggattttaccaatggcaaacgtaacattatttaaacaagatggtagccaaaatgggaacgttgaattaaacgactcaatctgggctatcgaacctaacgaaaacgttgtgtttgatgcaatcatcatgcaacgtgcttcattaagacaaggaacacacgctgttaagaacagatcagctgttcgtggtggtggtcgtaaaccttggcgtcaaaaaggtacaggtcgtgctcgtcaaggctcaatccgttcacctcaatggcgtggtggtggtaccgtatttggtcctacacctcgttcatacagctacaaattacctcgtaaagtacgtcgtcttgcaatcaagtcagtactttcacaaaaggttatcgacaatgatttagttgttgtagatgcattcaactttgacgcacctaagactaaagaattcgctgaagtacttaacaagttagacgttaatactaaagcattggtagtacttgaagacggaaatgattttgctgcattatcagctcgcaacttacctaatgtaactgttgtagctgctgatggtatcaacgtattagacgttgttggcaaccaaaaattaatccttactcaagctgctctttctaaaattgaggaggtgcttgcataatggaagcacgcgatgttattttacgcccagtagttactgaaaattcaatggctgcaatggacgacaagaaatacacatttgatgttgatgttcgtgccaacaaaacacaagtgcgttacgcaatcgaagaaatctttggtgtaaacgttaaaaacgtaaacatcatgaacgttcgtggcaagttaaaacgtcaaggtcgctatgctggctatactaaaaaacgccgtaaagcaatcgttactttaactgctgattcaaaagaaatcaagattttcgaagattaagcaacacttaaatagaataattataggagggtatacacgtgggaattattaagtacaaaccaaccacaaatggtcgtcgtaatatgaccagctcagattttgctgagatcacaaagacaacccctgaaaagacgttgttggaatcccaaagccatactgctggtcgtaatgcacatggtcatatcactgttcgtcatcgtggcggcggtcataagcaaaaataccgtgtcatcgacttcaaacgtatcaaagatggtatcaaagcgactgttaagtcaattgaatacgatccaaacagaacttcaaatattgcattaatccaatatccagatggtatcaaagcatacatcatcgcccctaaaggtcttgaagtaggcatggttgttgaatctggtgtggatgccgatattaaagtaggtaacgcattaccattagctaatattcctgatggtacacttatccacaatatcgaattaaaacctggtaaaggcggccaattggttcgttcagctggtacatcagctcaattattaggtaaagaaggcaaatacgctatcgttcgtttaacttctggcgaaacacgtatgatcctacttacatgtcgtgcaacgatcggtactgttggtaacggtcaacacgaattaatcaagattggtaaagctggccgtaaacgttggatgggtatccgtcctacagttcgtgggtcagtaatgaaccctaatgatcatcctcatggtggtggtgaaggtaaagctccaatcggtcgtccttctcctatgtctccatggggtaagaagacgcttggtaagaagactcgtagtagtaaggctcgttcagagaaacttattattcgtcatcgtaaatcaagataatcaattccaattgaacatgtctaaagccaatgcggcttaaacataagtcacattgaactttttattcgaaggaggtttcataatgagtcgtagtttgaaaaaaggaccattcgcagacgcacacttgctcaacaagattgaagcacaagccgatagcgaaaagaaacaagtcatcaagacttggtcccgtcgctcgacaattttccctagctttattggctacacaatcgctgtttatgacggacggaaacacgttcccgttttcatctcagacgatatggtaggccataaattaggtgaattcgtaccaacaagaactttccatggtcatggaaatgacgataagaaaacaaaagcacgctagaaaggaggatgaatctcaatggcagatcaaattactagtgcaacagctagcgcaaaatcagttcggatggcagcccgtaaagtacggatggtagtcgacttgattagaggcaagagcgttgcagaagcaattgcaatcttagaatttacaccaagagctgcttcaccagtcgtaatcaaagttttgaaatcagctatcgctaatgcagaacataattacgacttagatgcagaaaacttggtcgttacagaagcttatgctaacgaaggaccaacattgaaacgttttcgtcctcgcgctaaaggctcagcatcaccaatcaacaaacgtacaagtcacatcactgtagttgtatcagaaaaagaagcataaggagggatatcgcgtgggtcaaaagattaatccaaccggttttcgtgttggcgtcatccgtgattgggacgctaaatggtatgcagaaaaagatttcgcaacattcttacacgaagatcttaagattcgtaaatatatcaacacaaaattagctgacgcatctgtctctactattgaaatcgaacgcgctgcaaatcgcgtgaacgtttcaatccatactgctaaacctggtatggtcatcggtaaaggcggttctgaagtagaaaatctacgtaaagaattaaacaacttaacaggtaagaaagtacacatcaacattgtggaaatcaagaaacctgatttagacgctcacttagtaggtgaaggcattgctcgtcaattggaagcacgtgttgctttccgtcgcgctcaacgccaagctatgcaacgtacaatgcgcgctggtgctaagggtattaaaactcaagttgccggccgtttgaacggtgctgacatgtctcgtgtcgaaacacatgctcaaggaactgttcctttgcatacgctacgtgcagacatcgattattcatgggacgaagccatgactacttacggtaaattaggagttaagacttggatttatcggggcgaagtattacccgctaaagccaacaacaatacgaaaggagggaaataaacatgttagtacctaaacgtgtaaaacatcgtcgtgaattccgtgggaagatgcgcggtgctgcaaaaggtggcaaagaagtcacttttggtgaattcgggctacaagctttagaatcaagttggattaccaaccgtcaaatcgaagctgctcgtgttgccatgactcgttacatgaaacgtggtgggaaagtgtggattaaaattttccctcacaaatcatacactgcaaaaggtgtcggcgttcgaatgggttcaggtaagggtgctcctgctggatgggttgctgtagtaaaacgtgaaaaagtcatgtttgaaatcggcggcgtttctgaagaagttgctcgtgaagcattacgcttggcatcacataaattgccagttaaaactaagatcgtaaaacgcgaggaagtaggtggcgagtcaaatgaaggctaaagatattattgaattaaccactgctgaaatgcttgaaaaagaacaccaatacaaagaagaattattcaatcttcgtttccaacaagctaccggtcaattagaaaataccgcccgcttaaagcaagttcgtcagaacattgcacggattaaaactgtattacgtcaacaagaacttaacaaataataaatggaaaggagctatttactttgagcgaagaaagtcgtaaccatcgtaaagtgtaccaaggccgtgttgtttcagacaaaatggataaaacaattactgtcgtggttgaaacttataaaacacatcctgaatatggtaaacgtgttagatattcaaagaaatattatgcacaagatgacaacaacgaagcaaaagttggcgacgttgtgcgtgttatggaaactcgtcctttgtcacgtacaaaacggttccgtttattagatgtcgttgaaaaagcagttattatctaaatcgttactcaatatatatataagtgacggaaggaggacctataagtgattcaatcagaaagtcgtcttaaggttgctgataactccggtgcccgcgaaattttaactattaaagttttgggtggttcaggtcgcaagactgctaacatcggtgatgttatcgttgcaacaattaaacaggcaacaccaggtggcgttgtcaaaaaaggtgaagttgtcaaagctgttatcgttcgtactaagtcaggtgctcgtcgtgcagacggttcttacatcaagttcgacgaaaacgctgctgttatcatcaatgatgacaagactccaaaaggaacacgtatcttcgggccagttgcacgtgaattgcgtgacagtgatttcatgaagatcgtttccttagcgcctgaagttctataattacagacaaccaaggaggtgcgtatatcaatgttcgttaaaactggtgataaagttaaagtaatcagtggtaaagataaaggtaaagaaggtacaatcatcaaagctatgcctaaagaaggccgtgttgttgttgaaggtatcaataccattaaaaagcatgttaagccaaatgctcaaaaccctaatggtgggattgttgacacagaggcaagtatcgatgcttcaaacgttatgctaattgatccatcaaacaacgaagctactcgtgtaggtttcaaagtgattgatggtaagaaagtacgcgtttcaaagaaaactggagaatcaatcgataaataatcttttggggaaaggaggcactttttacatgactaaccgtttaaaagaaaaatatgttaaagaaatgacaccagcgttgatcgaaaagttcaactacacatcaagcatgcaagtacctaagatcgaaaagatcgtacttaacatgggtgttggtgatgctgtttcaaacgctaagaatttggataaagctgttgaagaattaggtttgattgctggtcaaaaaccattaatcacaaaagctaagaaatcaatcgctggtttccgtttacgtgaaggtatgccaatcggcgctaaagtaactttacgtggcgaaagaatgtacgatttcttagataaattagttaacgtatctttacctcgtgttcgtgattttcacggtgttagtgcaaaatcattcgatggtcgcggtaattatacattaggtgtacgcgaacaattgatcttccctgaaatcgattatgataaggtagatcgcgttcgtggtttggatgttgttattgtaacaacttcaaatactgacgaagaagcacgcgaattgttaacacaatttggcatgccatttgctaaataaaaagggaggtcaatttcttggctaaaaaatctttagttgtaaagaatcatcgtccagcaaaattttcaacacaagaatattcacgttgcgaacgttgtggacgtccacattctgtatatcgtaagtttaagctttgccgggtttgcctccgtgaattagctcataagggccaaattccaggcatgaaaaaagcaagctggtaattataaagagtcaataaggaggttaattccacatggtcatgacagatccaatcgcagactatctaacacgtattcgtaatgccaacatggtacatcacgaatcattagaagtccctgcttcacgtatgaaaaaagaaatttctgaaattttgaaacgcgaaggctttatccgcgattacgaagtgattgaagacgacaaacaaggtatcatccgtgtattcttgaaatatggtaagaataacgaacgtgttatctctggtttgaaacggatttcaaaacctggtttacgtaattacgttaaagctaatgatgttcctaaggtattaaacggcttaggcatcgcaattatctcaacaagcaacggtgtcgtaactgacaaagaagctcgtgaaaaggctgccggcggcgaagttctcgcatacgtttggtaatctaaacttaaaataaggaggtgtcataacgtgagtcgtatcggattaaaagtaatcgaagttcctgcaggtgttaccgttactaaagacggtgaaaacatcacagttaagggacctaaaggtgaactaacacgtcatttcagtccagtgattgaaatgcacgaagaaggtaaccttatcaactttacacgtaatagtgaaagtgatcgtgcaatgcacggtactatgcgtgctaacttaaacaacatgatcttgggcgtaacggaaggtttcaagaagacattggatcttatcggtgttggttaccgtgctcaattgaaaggcaagactttagtattgaacgttgggtattcacatccagttgaaatggaagccccagaaggtgttacagtcgaagtcccatcaaacacaaacatcatcatcagcggtattagcaaacaacaagttggccaattcgcagctgaaatccgtgatgttcgtcctccagaaccttacaaaggtaaaggtattcgttatactgatgaatatgttcgccgtaaagaaggtaaaactggtaaataaagcagcctgagctgttaaacgatattaagaggtgaaaattgtgattacaaaaccagacaagaataagacacgtcaaaaacgccatacacgcgttcgtggcaagatctctggtactgctgactgcccacgcttgaacgttttccgttctaacaaaaacatctacgctcaacttattgatgacgtagcgggtgtgacgctagcaagtgcctcaacattagataaagaagtaaaagcagaaggtactaaagtagaacaagcacaacaagttggcgcattagttgcacaacgcgctgttaaagccggccataaagttgttgtttttgatcgtggcggttacttataccacggtcgtatcgaagctttagctacagctgctcgtgaaaacggactagaattctaataaggaggaaaaccatttatgacttacattgatccaactcatttagatttagaagatcgcgttgtttcaatcaaccgtgttacaaaagttgttaaaggtggacgtcgtctacgtttcgcagcaatcgtaatcgttggtgataaagacggtcacgtaggtttcgggacaggtaaagcacaagaagttcctgaagctatccgtaaagccgttgaagacgctaaaaagaatcttatcaatgttcctaaggtcggaacaacattacctcatgaaattattggtcgcttcggcgctggtcgtgttctattaaaaccagctgttgaaggttctggtattgctgccggtggtgctgttcgtgccgtcatggaattagcaggaatcgatgatgtgacaagtaaaacattaggtagcaaaactgctatcaatgttatccgtgccacaattgacggtttaactcgtatgaagactgctgaagaaattgcagaattacgtaatgtatctgtagaaagcttacaaaactaggaggataactgaacatggctaaattaaagattactttaagaaaaagtgctgctcatcgtcttccagaacaacgtaaaatggtcaaagaatttggcttgaaccgagtaaatagttctgtaatcaaaccagatgatgctgcaactcgcggtgtgattttcaaactcgcacatttagtaacagtcgaagaaattaaagactaatttcaacatatattgcaaggaggtgcgcacaataatgaaattacatgaaatgaaacctaacgaaggtgctcgtgacgttcgtaaacgtgtcggccgtggtacttcttcaggtactggtaaaactgctggtcgtggtcaaaaaggccaaaaagctcgtagtaaagtacgtttaggatttgaaggtggacaaatgcctttattccgtcgtatgccaaaacgtggattcaagaatatcaaccgtaaggaatatgctgttgtcaacttaaacgatttaaatcgttttgaagacggtgcagaaattacttcaactgttttaatcgaagcaggcgttgttaagaatgaattatcaggtgttaaattattagcgaatggtgaattaaacaaaaaattgaacattaaggtaagcaagtattctgaagctgcaaaagctgctgtagaagctgctggcggttcaattgaggtgatttaattgctaaagacactcaaaaacgcatttaaagtaaaggaaatccgtagtaagattttgtttactttaggcgttttgatcgtttatcgtttaggtgcacaaattacggtaccaggtgtgaatgctggtgcattgactaagttgggttcaactggtttgatcccattgcttgataccgtaagtggtggtggcttggcgaactattccatcttctcgatgggggtttcaccattcatcactgcccaaattgtggttcaattactacaaatggatattgtgcctaagtttgttgaatggagcaagcaaggtgaagttgggcgacgtaagcttaaccaagtaacgcgttacttaaccatcatcttagcgtttatccaatcgatagggattaccgctggctttaactcactcagtcaaatgggcttggttaaagatccggggattaagaccttcgttagcatcgggatcattttaacgggtggtacgatgttaattacatggttgggtgaacagataacggataaaggcttagggaatggtgtgtcaatgatcatctttgcagggatcattgcacgccttccaagcggtctttaccaaatcttccgcgaacaagtcttgaacgcttcaaaaggcgatatgtggaaaggtgtcttattcatcatcggtttgattattgcagtactcgtgattgtcacatttgtgacatgggtccaacaagcaaatcgaaagattccgattcaatatacgcgtcgtgaagctggtgcaggtgaaaatagttacctaccccttaaagttaacgtcgctggtgtgattccggttatcttcgccagttcatttattatgacacctcaaacaatcttaatggccttccaatcaggtcatggtgcagatacttggtttaaagtattatcagatatcttcagcatgcagactgtgacaggttcgattgtttatacggtgctcattgttctctttaccttcttctatgcttttgttcaggttaaccctgaaaaagttgcggagaacttgactaagcaagggagttatatcccaggtgtttggccaggtaaaggtaccgagaagtatctttctagcgtattaatgcgtctttcaactgtcggtgcgttgttccttggggtaattgcattattaccacaattagcagcaaacctcggtggcttaccccaatcaattggtttgggtgggacgagtttactaatcgttgttggtgttgcgcttgaaagcacacgtcaactcgaagggttacttatgaaacgcaagtatgttggattcattcgataagcaattatcgtttaaaaagtattgaatcctggttttaaataggaggcaaaggcatgaatctcatgttaatgggacttcccggcgctggtaagggaacgcaagctgaaaagattgttgacgcttatcatattccacacatttcaactggtgacatgttcagagctgctatggcagatcaaacagaacttggggttaaagctaagtcattcatcgataaaggtgaattggtaccagatgatgtgaccaacggaattgttgaggaacgtcttgcacaagcagatactaatgtaggttatctccttgatggttttcctcggactcttgatcaggcggatgctttagctgccattactgataaattgaacaaacctttagatggtgtgattaacattgatgttgatcctgaaatcttggctgatcgtttatctggccgctttatttgtaaaaattgtggtgcaacgtaccacaaactttaccatccaactaaagtggaaggtacatgtgatcgttgcggcgaacatgttttcttccaacgagaagacgacaaacctgaaacggttaagaatcgcttaaaggtcaatatcgaaatgaatacacctttacttgattattatgaaaaacgtaacctactttacacggtggatgggaatcaagaaattgatgatgtgttctctgccgttcaaaaagtacttgataccattaaagactagtcatcaactcaagtgatctcacggtcattgttcacgtaaaagcctgactagttgtttaatgacagaattctcagtgcttttaaaaatttaatacttgtgatataatatctcggtatgaccactagcggtgagtgcggagagctctcaccatttttctgtatgaattttcacaaccacaagggggtacttttgcgtggcaaaagatgacgtcattgaaattgaaggtaaagtaactgatactttaccaaatgcaatgtttaaagtagaacttgaaaatggtgcagttattctggcacacgtttctggtaaaatccgtaagaactacatcaagattttacctggagaccgtgtgacagttgaattgtcaccctatgatttgactaagggacgaattacgtatcgctttaaataggcgtaaggatcatatcaaggaggtcagtcgatatgaaagtaagaccatcagtaaaaccaatgtgcgaacattgtaaagttatcaaacgaaaaggccgcgttatgattatctgcgcagctaacccaaaacataaacaacgtcaaggttaatattaattaagcaggaggtgcaagaatggcacgtatcgcaggtgtggatttaccacgtgataaacaaattgtgattgctttaacttatattttcggtatcggaaatacaactgccgttaaagtcttggctgatgctggcgtcgcagaagacgtccgtactcgtgatttaacgccggatcaagaagacaagatccgtgcagcaatcgacaaagttaaagttgaaggcgatcttcgtcgtgaagttagcttaaacatcaaacgtctacaagaaatcggttcttatcgtggcatgcgtcatcgtcgtggattaccagttcgtggtcaaaacacgaagaacaacgcacgtactcgtaaaggtaagaaagttacgattgcaggcaagaagaaataatcagtaaaaggaggttataatttatggcaaacaagaaaaatgctccacgtaagcgtcgtgtgaagaaaaatatcgaagccggcgttgcacatattcactcaacatttaacaatactcttgtgatgatcactgatcctcatgggaatgctgttgcatggtcatctgctggttcattaggtttcaaaggtagtcgtaagtcaacaccttttgctgctcaaatggctgcagaagctgctggtaaagaagccatggaacatggtatgaaatctgttgaagttgctgttaaaggaccaggttctggccgtgaagctgcaattcgctcattacaagcaactggtttagaagttactgctattcgtgacgttacaccagttcctcataatggatctcgtcctccaaaacgccgtcgtgtttagtctgggctacgcttcattttgagacaaactgaaacgtgttcacgtataaacacttctcgttttgaaaggggtaaaagataagaatgatcgaatttgaaaaaccaaacattacaaaggttgatgaaagtactaactacggtaagttcgttgtagaaccacttgaacgtggctatggtacgactttaggtaactctttacgtcgtattttactcgcttctttaccaggtactgctgtcacagatattcaaattgatggtgttttacatgaattttcaacaattgatggcgtcctagaagacgtaacacaaatcatcttgaatattaaaaaattagcacttaaattgcatgttgaagaagacaagacaattgaaatcgatgttaagggtccggcaacagttactgctgctgatatcatttctgatgatgacgttgaagtcttaaatactgatcaatatatttgtacagtagctgaaggcggcaatttccacgtgcgaatgacagttaaaaaaggccgtggttatgttgctgctgatcaaaacaagtcagacgatatgccaattggtgttttgccaatcgactcaatttataccccaatcagtcgtgtcaactatcaagtagaaagtacacgtgttggtcgtcgtaacgatttcgacaagttaacacttgatgtttggacaaacggttccatcagtcctagagaagctattagcttagctgcgaagattatgacagagcatttggcaatctttgtagatcttactgatgaagcgaaaaatgctgaaatcatggtcgaaaaagaagagacacataaagagaaaatgcttgaaatgacaattgaagagttagatttatcagttcgttcatacaactgtttgaaacgcgctggaatcaacactgttcaagagttaactgacaaatcagaagcagatatgatgaaagttagaaatcttggtcgcaagtcgttagaagaagttaagaacaagttatttgatcttggcttaggcttacgcacagaagaataaactgataagaaggagggactccattcatgagttatcgtaaattaggtcgcacaagctcacaacgtaaggcaatgttacgtgatttgacaactgatttaatcatcaatgaacgtatcattactacagaagctcgtgccaaagaaattcgtaaaacaactgaaaaaatgatcactttaggtaaacgcggtgatttacacgctcgtcgtcaagctgcagcattcgttcgtaacgaagtagctgatattcgcgaagaagacgatgctgtaatcgttcaatctgctttacaaaaattatttagtgacattgctccacgttatgctgaaagaaatggtggttacacacgtattcttaaaacagcccctcgtcgtggtgacggtgcattaatggtgattattgaacttgtttaatcacaaaatgatttaggtcatttgatcgatgagacagggcgttatgatgatggaagtactccgagtctagtcctaaggtcatactagcaacacagtatggctttcatcgattgatgatttacataaaataacgtctaattccgagttaaatcggagttagacgttttttgtgttggatatcctttgaataaagggtgactaacgaaagcgctatggccttttatatgataaaataggaacaggtttttgatttgaaacgtgcatggataacataaccaatgcactttaattccaaggaaaatacgggttattaatcatgaatgagcaaaaaataattcaagttgaacatttaaaatatgaatacccacaatctgaaggacatttagcactgaatgatctttctgtcagtatcaatgccggcgaatgggtcgccattatcggtcataacggtagtggtaagagtaccttcgcgaaatcattgaacggtttgttagatttacaatcgggatcagtgacgattgatgggttaccattgtcgttggataacgtgtggactattcgccagaaaattggcatggtttttcagaatccggataatcaatttgtcggtgtaacggttgaagacgatgttgcttttggtctcgaaaatcaggggattccgcgagctgaaatgattgaacgggttaaagacgcggttgaacgtgttggtatgagtgaatacttgaaacgtgaaccaagccgtttgtcgggtggccaaaaacaacgagtggccttagcagggatcatcgcacaacaacctgagattctgattctcgatgaggccaccagtatgctagatccaaaagggcgcgaagaagttctcgcaaccattcataagttaaaacaagaaacaaacatgaccgtgctatcaattacccacgatattgacgaagccgcaagtgcggaccggatcattatcttagataaggggcaagtgcatgatcagggcacaccggccgatatttttgcatatgggcaacgtttgcttgatttagggctagatgttccatatccagaaaaacttaaagcagcgctaaatgaacgcgctatcgagatgcccacagattatctcacaacggaaaggatggttgagtacttatggacattacattcaaaaatgtaagctacacttatcagccaggcacgccttttcaagggattgggctagaaaatatcaatgtgaccattccaagtggctcctatacggctttgattggtcatacaggtagtggcaagtcgacattgctccaacacctcaatgcactcttaaaaccaacgagcggcgttgttcagattggtgagcgcgaaatcacgcctgagaccaacaacaaaaacttaaaggctgttcgtcaaaaagttgggatggtttttcaatttcctgaaagccaattatttgagtcgacggtgcaaaaagatattgcttttggtccgcagaacttcggtgtccctgaagctgaagcacttgaacgcgctaaagagatgattgaactcgtcggtttacccgctaatgtgattgacaagtcaccttttgatttatctggtgggcaaatgcgccgcgttgccattgctggtgtgttggcaatgaaaccggaagtattggtcttagatgaaccaaccgcggggctcgatccagttggccggcgtgagatgatggcgctttttgaaaagttacacagtgagcaggggatgacgattgtgatggtcacccatcagatggatgatgtggcgaactacgccgacaacgttatcgttttggaacatggcaagctagctaagaccggagcaccacgcgaaatttttgcggatccggattggttaacggaaaaacaacttggcttaccaacaacgactcagttcgcgcaagctttaatgcgacaaggctttgtctttgatcaagtaccactaaccgaacatgaattggccgccttattagcggaacaactaccgaagaaggcggggattggacatgaataaattaattctgggccgatatatccccggtgattcagtgttacaccggatggatccacgggcgaagttattagccagtttttattatattgggatcatctttttagcgcgtacatggcaagcctatgttttattactggtctttacgttagcgctaatcgggatttcaaaaattaaactcgacttctttattaaaggagttaagccgctgttatggctaattctatttacagtgctcttacagattttcttcacccgtggtggtcatgtctattggcagtggggatttctgacgcttacccagtacgggctgattaatggcgtctacatcttcatgcgctttatattgattattttcatgtcgactctcctgacattgacgacgccgccattgtcgttagcggatgcgattgaatcaattctcaagccgcttaaagtagtccattttccagtgtatgaagttgcattgatgctatcaattgcattgcgctttgtaccaacattgatggatgaaaccactaagattatggatgcgcaacgtgcgcgtggggttgattttggtgaagggaatttattccaacaaatgaaagcaatcgtgccgattttaattccgttatttgtcagcagttttaaccgcgcggatgatttagcaacggcaatggaagcacgggggtaccaaggtggcgaaggccgcagtaagtaccgaattttgaaatggcggacaagagacaccgtggcatttatcacgatgggccttttaaccgtcgcacttttattcttaagataacgcaaaaaggactcagttaaaccaacggaggttgatttagctgagtcctttttttttgcacttttttgattagcttgttttttgaaccgacgtttcaacgttgaagcactaatgccagtttggtaactaatttgagcgtacgtaaagccctcttcacgcatgtctagggctgcttgtatgttcatcatcagtataggtcgttttacgaccttcagtgtaactagggttggtgacacgagcattatgtttcccttcctgggtacgagtgagaatcatatcgcgctcaaattgcgcaaaagcactaaataaggtaaaaatgagtcgtccggaaggggtgtcttcaatgatgcccatgttcaaaatatgaattttaatgcgggctttaaaaagttcttggatgatttcaagtgcttctttggtatttcttgcgaagcgatcaagttttgtaacaacgatggtatcaccacttgaaacccgatctaatagttcattaaattagggcgatcaacggtagttccggtaaacttttcgctgtagataatgtcacagctttcttcctttaattgactaatctgggttgctagactttgtccggcagatgaaacgcgtgcgtatccgaacttcattgcacaattctccttatttctacttataataataattatacagcatttgaacttgttttatattaaaaatgcatttttaaatcaaattttttacgaacattcataaaaagattgctacttttcagaaaattatttagaatagaactactaactttttaacacaagagggataaaatgacacaacggtatcgcgtaacaattgcctatgatggaacggattttgcgggtttccaagtgcaaccgaaccaacgaacagtacagggcacattagaaaaagcactgacaaagatgagtaagggtgcttatattcaagtgtatggttcagggcggacggacgcaggtgtccatgcaacggggcaggtggtccatttcgactatccaggtcaattacccgctattagtatgttacgggccttaaatagcctcttaccgcttgatatggaggttgtggatagtcagttagcggatgatgactttcatgcacgattttcaacggtcggtaaacggtatatgtatcgggtcgatcttgggcattatacgaatccattcaagcgacgttataccggtcattatccgtatccaatcgatgtggaacggattcaagcggcgctgccagatgtgatgggcacgcatgattatacgagttttgcggcttcaggtggggtcattaaggataaggtgcggacgatttatgatgcgaccgttgttttcaatgaacccgaaaatgaactcgtttttgagttttatgggaacggctttttgtataacatggtgcggatcttggtcggaactttattagaaattggtaacggtcggcgggatgtccacgattttttacggctgtatgaagttaaggaccgtcaacaagctcgctcaaccgcgccagcaagcggtttgtaccttaaaaaagtttattacgaaactgatgaaaataattgagattcaattgacttaatcgtgaaattacgatactatagtatctggtattgtttgccccacgataggccccggaaacttattgagtgtcaaacaaacacagaatattggaggaataaatcgtgcgtacaacttacatggctaaaccaggcgaagtagaacgtaaatggtatgtgatcgatgcaactgatattgcattaggtcgtctatcaactgtagtcgcttctatcttacgcggtaaaaataaaccaacatttacacctaacgttgatacaggtgataacatcatcgtcatcaacgctgaaaaaattaaattaacaggtcgcaaagcaaccgacaagttatatcatcaccatagtaaccatcctggtggtttgaaaactcggactgctggcgaaattcgtgaaaacaacccagaacgtttaattgaaatgtcagttaaagggatgttacctaagaactcattaggtcacaaccaattcttgaagttacacgtatacgctggtggcgaacacaaacaccaagcacaaaatccagaagtcttagacattacggacattatttaaggaggaaactatagtggctcaagtaacttataacggtacaggccgtcgtaaaaactcagtagctcgtgtacgtttagtaccaggtactggtaaaatcactatcaacaacaaagacgttgttgattacattccatttgctaacttgattttagatatgaaacaacctttaacaattactgaaacaacagatagctatgatatcttggtaaacgttaatggtggtggattctcaggccaagctggtgcaatccgtcacggtatttcacgtgccctattgacagttgaccctgacttccgtccagctcttaagagcgctggcatgttaacacgtgaccctcgtatgaaggaacgtaagaaaccaggtcttaagaaagctcgtaaagcttcacaattcagtaaacgttaatatcacttttatatcaatgtttacaagtacctcgcaattttatattgcggggtgtttttttgtttttgacaccatcagactttttaagtgtaagcctaatgcgccatcccagcctattcccaatatttttgctatgcttagagtaattgaaggaggcttttttatgtatcgttatgccgttatttataatccccactctgggcacaacaatggtgagtcggttggtcagaaaattgagcaggcactcatcaagaatcaacacaaggtcgaactgatgccgacggaagggccgaaagatgcaacgcggttagctaaaaaagcggcgcgggcaggctttgatgtggtggtcgctgtcggcggggatgggaccattaatgaagtcgttagtggtcttgcgacgttagatcagccgccttatttaggcattgtacctgctgggaccgtgaataatttggcgcggatgttacaaatcccgttggacattgatcaagcgattgaaaatctgcagcaggttcatctgcgcccactcgacgtcggccaagtgaacgatgattacttgattagtacaatgacattgggcattttggcggacgccgcgttgaacgtgactcagagtgaaaaacaaaaatgggggccgctagcttttttaagcaaaggcatccatgcattagcggagcatcagcattatccgctaacgattgaaacgcctgatcggcactggcaaaaagacacgcaattcttgctggtgaccctcacgaattccgttggtggatttaccaacttcaatcccgaagcgcaacccgatgatggttatttccatgtcttcgttgcgccgaaaatgtcgctagcacggtcagtgatgtttctcccttatttcttaacgggtaattttaagaagattcccgggatgacttactttaaagcgaatgaaatcagcatcacagtcgacaatcagcaaagtgcacaaacccgcattgatggtgatccgagtgccaagtcaccattggagatgcgactcttagaacataagttgcaagtgattacgcctaatccggatttataagaccaggggaggttaagatcatcggtaaaacaaaaaagaattcaaaattttctaacgaaaattctgaattcttttttttaattattgcgttaattcagcttgtttggccgcaacgcgttcactaatcttcaggaatggccagtagattagaacgccgaggattaaagtgaagccttgaatcacaggggcgcgccaatcgccgccggttgctaaataggagttgagtaatggtggtgtggtccaaggtaccatgacgactactcgattcatccagccaattgcggtgaagaagtaggcaatactgatgccaagtcctggcattaggacaaatggaatgatgagcgcaaagttgaagacaattggataaccgaaaaataacaggttcgttaatgttaaataaacttgggacgaatgatagctttgtaatatcacgactagcgcgtgattttgagaagagcaaggtcgcaatcaataaacaaatagtactaccggtaccaccaagcatcccaaatgtatcgcggaaaacgttgttgatgatataagggatgtgttgaccagctgcgtaagctgccatatttttgttcatgttgatcagtaagactggatccaataaagtaccgttaatgacagcttgatggatcccaaatgagaagaggagattaccagtcccgtaaatcaaaaggagacccggtaaacttgtattaacgcgccgaagtggttcttgaatcacatttgtaattaaagtgatgagatcagtgtggaaaccagccgttaaaatcgcagcaagtgccgcaaaaagactcactgtaatgagggctggaatcattgtgttgaaggaaccagcaacagctgatgggacggcatcactcaagttaatctgtaattttttaagctttgaaagagtcataaagagttctgttgcgactaaaccaataataatgccggcaaacattccggttgttcccacgttttggaaagttaagacgccagaaacttcgacggcttttttggcagctagtggtgtgaccggaacagtattaggcatcatgatgattaaagtccctagtgccatgacagccgcggaaattttgttgacgtaattcttattacgcgctaaacagtagccgattgtaggtgcgagtaatagcccagcaacgttcaaagtcccattggtaatgtaagtgccgaagtattgaaagttggttagcatttggccgtggaggacccaagggaatacaacgttattcacgagcaccccaattccggcgaggatgaatagtggcataataatcgcgaaggcatcacgtaatgaacgcaaatgcacttgattcccgattttaaaggcgatatttgtaaactgatcaataaatctttgtcgccgacttccttgtttaagcatagaaaacactccttttaacgcactttttttagtctaattgttcaccgttagattgaatgactttttgcagccaataaaaactagccttcggaattctagcaaggtctttgaggtcgtgattggttcgattgacataaacgacgccatagcgtttattcatatcaccttttgaacttgggatgtcgattaacccccaaccaagatagcccacaacgtgagcgccgtcttcatcaactgcgtctttcaaagcctggatatggtcgcggtgataggcaatccgttcgtcatcttgaatcatttcatgattcagcgattcttcgcgaatgccaatcccgttttcgatggggaagatggggaggccagtttcattcgaaagttttgttaagacgtttctaaaaccgagggcatcaatctgccagccccattcgctactttctaaataaggattagggacactcgcatcgcgcatgtaataattgggtggtgtgttgggtgttaattttgtgtgatcgagtgcgacagtgtagtagtaactgaacgctaagaagtcgttgtgatgacttgcaatgagcgctaaatcaccaggctgaatactgctcattaagtcatgattttgcatatattgcagtacttcggctgaatagtgaccttttgtaaaggcgtcaacgaaatgttggttgataaattctgatgcttttctagcagcaaagatatcttggggatgactggttgcaggatagaattcttgataggctaacatcccaccaatttggtcattagggtagtgggcgtgtaagtaattggcgatttcagcatgcgcaaccattgtattattagcgatcgtataaagggttaataagtcgcgctctccgttgataaagccagtattatcaaagccaggttcaaagaaaaaaccattttgttcattaaagcttagccaatatttgacttgtccaccataacggtcaatgacagccttagcgaacttagtgaatacttgtgtgacataccgacttgagaaaccattatatttttcagcaagatgcaaaggcatgtcaaaatggtacaggcaaatcatcggttcgatgcccgctttgagcaaagctgatatcaatcgatcataataatcgaatcccgctaaattaatttcaccatcaccatttgggaaaatgcgcgtccatgaaatttggaaacgatagcagttcatacccatctgttgcattaaatcgatatcttcttgataacggtggaattcatcaattcccactttccaatccgataaatcagctgtctcaggtttcacatcgtacactgataaacctttaccatcagcatcccaggcaccttcactttgcatacttgatacagaattaccccataaaaaatgtttgtctaacgtcatcatggtacctccatcacttgaatgattttatgatagcgcttttaatgtaacttgtaaagtcatattttataatttgaacaacgaatattccgaatctgaatatgctataataaccatatcaaatggtaggtggttactatggcaaagtataaggatattgcgacaacgattcgcacccgaattttagaaggacaatattcagctgatggtccgcttcctgaacagaagaagttagcccaagaattcgaaacatcgagaatgaccattcaaaaagcactcgaaatgctaacttatgaagggctcatttatagtgaacaagggcgcggtacgtttatcaaatcaaacgtctccgcgctatcacaattagatgcgactgtgaatcaatatgtagggacgactaagctgtttgccggaaaggccacagtaaagagtgacattctaaagaatgaattgcgattaccggatgcagaagaacaagaaaagcttcagttagctaaaacagaagcggtctatgacgttgttcgactccggtttttaaacgaagtaccctatagtattgagcattcgatcatgccggctaagattttaggggaattaacagacgcagtacttaagaagtcgatctacgaatacttggaacaaacattgcatctaaagattggcgtggcttaccggcgaattagtgccgatcaaccgaatcaaatggatcaagaatacctgcactgcaaaccagtcgaacctgtcttacaagttacccagacagtctttctacaaaacgggctgccttttgaatactcaaccacacgacatcgatatgatatggggagtattacaaccattacacaagggaatcattaataaaatgacctcactcagttaatgagtgaggctttttttgttgcattgatttgaagttgttgacaaaaattcacatcaatggtttaatggtttaaacttatgaaccattaaaataaaaccggagattaatgtatggatgaaatgaaggttattaaacagagctttgctgagctgagcccgtttttgacggcgcttggggatgagaagcggcagagtattattttagaattgatggctgataaagcttgtgatggcttacaggtcacggatttaatggcggcgtcggacttgtcgcgcccggcagtgtcgcatcatttgaaagtgttgaaggaagccaacttggtcgactttagacgcgaaggcacgaagaactattattacttgcaacacgaactgggcgaaatcaatcaactaaaaacactgctggatcagattacggcagtcatcgaaaaacaacagtaaaaggagtttttaaaatgcaaaccatcttaggtagtagcggtcagattggccaagagttagccaaggcacttcataaggacttcacaacggacattcgactggtcagtcggaatccaaaaaaagtgaacgcgaacgatcaactatttccagcaaacttgctcgacgccgcccaaactgatcgtgcggttgcaggcagtgaaattgtttattttaccgctggcttaccgatgaattcagacatgtgggaagcacaatttcacattatgatgactaacgtgattaacgcgtgcgtcgcgcacaaggccaagctcgtctttttcgataatacctatatgtatgcgaaaaatagcacgctccagacagaagcgagtccttttgaacccgttggccgcaaagcggttgtccgagcggagatcgcacagttgttacttgataagatggcaactggcgcaattgaagcggtcatttgtcgtgcatctgaattttatggcccaggcaagacgcaaagcattacgaacacaatggtctttaacaatatcaaggcgggcaaaaaggtgcgcgtgccattgaatgatcaagcggttcggacattaatttggacgccagatgctagtcgtgcgatggcgttgattggcaatacgctggatgcgtttggtcaaacgtggcacctcccttgtgatgacggtaaaacatacgccgaaatcatcgcgctagcaggcaccttaacgcatcaaccaatcgactacaccgttttaaaaatgtggcagttcaacatcggtagctggttcagcaaaccgctaaaggaattaaaagaactcctacctagatatgaagaagataacctgttcagttcagacaagtttaagaaacggttcccagaatttaaggtgacgacgattgaagaaggggttcaggagattctttaaaaagtcagcctttcgctcgatagactaactgttgttcaatattatataatcgctttaaagtagcgatgttagtcaatcagataaggagcgtggcatgatgaagaaaccttttaataagcaacaagtgaatggtgaaccaaatccggaatttgattccttctttgcggaagtcttaaagaagttgccgcaacaatcggcagctgtgattgcgaagtcttttaaccaatccaaagcattggcggaaaagacgatggcgaagagtcggacacagtttgatggggtctttgaagacttcctagtcggtgtggatgatcagatgcgtaaaaaggcacacaatatcattcacgcagcatcactaacagcagcgattattggctgttcaccaattccattttccgatgcgttcttgttggtgccggttcaattaacgatgatggcgcgtttgcataaactattcggtcaatcttggtcggctagtttgggcaagagcctgtcgaaagaattggtactcgttggcctaggtcggagtgcagtcggtaacattctaaaactgataccggtcgttggaacggtcaccggagccgcggtcaatgcgaccgttgcgatgtcgattaccgaagcgctcggctggttaacggtcaagatgttgaacgacggcgaagacatcttcaatgatgttgtttcatttaaaaatcaattcagaacgctatttggattgttacgacgtaagtagttatttttcaattgacagaataagaacaaaacgatttaataaacccacatcactaatttttagggaggctaaccagatgcccaaagtactaattgtccatacgaatgttacgcgttatcaaggaaccaccgatccaaccggattatggctgggggaatccgcagagttcgttgatgaactgcaaaaagcggggattgattacgattttgtcagtcctaaaggcggctttgtcccgcttgatccacgggggatgaagtacacggatgaatcaattctgaccatctatgaacaaccggattacgtgcaacgggggttagtcgcaacgctcaagccaagcgatatcaatccagctgattacgctgcgatttactatacgggcggccatggcgtgatgtgggattttcctgataatccagaattacaagcaattgcccgggaaatttataatcacagtggctatcttgcgtccgtttgtcacgggatcgcgggtttactacgcattaaaaatgatgacggtcagtatctgattgctggtaaaaaagtgactgggtttaccactgcagaagaaattattgcgggcaagaaaaaagtggtgccatttttaaaccaagaagtggcaactcaaaacggcgcgcaatttgtgcaaaaacggttttacaaaccatttactgtccaggatggtcagttgattacggggcaaaacccgttttctgtacgagaagtgacggagcgcttgattccggccctacaaaataacggttaggcattctttgaattctatgctaatcttatagaatgtagaaaagttaggagtcagaagatgagtgaaaaacaaacaccaaaattaacgcaaaaagaaaaaatgcaagcactaattgatcagaaaaaaggtggcggcagatcaaaacagaccgacgttgctaaaaatgatcggacaaagatgcgcaaagggccaaagatttttaacgaaatccactggtaaagagtgcgtttggttgcggttagcaactgagcattaagacaaaatccgcagtaatccaggttttaggagtactgcggattttagcttaagcggaagttgttgcaaccaaaaagcacgtttcaaacaaagtgcgtttgaaacggtttggttctgagcattaacctaaaaataagcactatggcggtccttgccatagtgcttattttgtagttaagcacaggagccagtttcaaaaagcacgtttttgggctagggcaattttgcgctagccctttttgtgttaacgcgctatgctagaagcaacttattttaaatcgaatggagtctttgtatgtcatctttaatcgaacaaatgcaacaccatgtttcagttcgtgatttcgagccaacacccctcagcacgacagtgaaacaacaactcattgcggcagctcaaagtgggtcttcttcgaatttcgttcaggcattttcaatcattgaagtgaccgatcccgtaattcgtgatgaaatcgcaacgatttctcaaagtgcggcgtacgttaaacagacggggacgttctatgttttcgtcgcggacttataccgacaagccacactcttagaaaaagcgggccagtcattagctggcatacaaaatatggaagccttattagtcgcaacgatcgacacagccattgcagcagaggatatggcagtcgctgccgaatcgttagatttaggcatctgttatatcggtgggattcgcaatgacattgcgcgtgtcgctgaactactcgggttgcccgcctataccgtcccactatttgggttaacggtcgggattccgaagactaaaaatcaggttaaaccacgattaccgcaagttaatcaagtcgctcaaaatcaatatgatgtgcatcaggcaaccaatttagtgcaatacgatcaacaaatgcaaaattattatgctaatcgtgggaccaatcagcaacaaactgattggtcgaccaagaatacggccttctttagtgaagtgcgacgaccagcagtggcgatttttttgaaaaaacagggctttacgttgaattaagaaaaaatggtacttatcttaaaggacaatcagttttctgattgtcttttttttgtgtcgtgcaagctcggatatgcgataataaaactagtcaaatgtaaccggttaaataggtataggagtgatcgttatgagtttaattgatgtacgacatgtagccaagcggtatcagatgggcgagacaacaatcgtggccaatcatgatattagttttacagtcaatgaaggggagttagcggtgattctcggaccgagtggtgcgggaaaatcgacagtgctgaacatcttaggtgggatggatacacccgatgaagggcaagtgttgattgatggtgtcgatattgcgcagtttagtgcgcgccaattgacggcgtttcgccggactgatgtcgggtttgtgttccaattttacaatttagtgccgaatttaacgacgcaagaaaatgtggcgctggcaacggctgtctcgccgaatgctttagatgttgcgcttgttttgcaacaagttggtctacaggatcggcttcagaattttccggcccaactatccggtggggagcaacaacgggtggcgattgcgcgggcgcttgctaagaatccgaagctcctcttgtgtgatgaaccaactggcgcactcgattatgaaacgggcaagcagattcttaaattattacaagaagttagtcggcaacaacaccggaccgttgttttgattacgcataatgccgcgattgctcagatggctgatcgcgtgattcacattaacgatgcgcgcgtgcgttcaattgaagtgaacactaatcccttgccagttgaaaagattgaatggtaggtggttaatatgcagacacgtttatatttacaaaccacattccgcgatattcggcaggcgattggacggttcattgcgattatcctgattattttaatgggtgtcttactgtttgtggggattaaatcgattggcccgaacttagaagagactgtggatcattttgtcaccacgcaacgcgtatccgatttacagattagtgggaccgctggcttaacggaacaggaccgtgcggtggtcgaaaaaatgcatggtgtccaagctgaattgggttatcggattccgtatcgcgatgaagcgcgggatgttaacttacaattatataattaccaaccaactgcacggcaaaatcgcttaacgctgactaccgggcgctatccgcaacgaacgaatgaaattttagtggataacgcggtcaagacgcattatcgtctggggcagagggtgacggttaagagtcagcagctattgacgcaccggtttaaagtggtcggttatgtggactcaccgctatatatcgaccgtcaggaacgtggaaccgtaccggtcggggatggtcagctagatggctttatgtatttgccacaaaaggcatttgcacctcaaccgtattcggtgatgatggtgcgctttagtgatttggatcgtcacagtagctttttacaggcttatcgcaccggcattgcgactaaagaaacacagctcatgcgccaattaaaagcacacacaactcagccgcagcaacagtacttattaactgcgcgcagtgctaatccgggttttaatgaatttacgagcttgtcggatcgcatcgatgcgatagggaatgtctttccggtcttctttttcttaatcgggattctaattacctttacaaccattacgcggatgatcgaagaaaatcgtaaggaaatcgggacattgaaggcactaggctatcgtaattgggaaattgcgcagaagtatttactatatgcgctactaacaggtagtatcggcaccgtgcttggcaccattttgggcacgaagttattaccgctagtcgtctatcgaatccaaaaaccggtctacacctttgcgcattatccaacccatttttggacagttccaattttattagccactggagcggtcttgattgcgacagttggggccacggggtatgttttaatccgcgatttacgcgagaagcccacccaattactccgaccaaaagcgccgaaaccaggccaacggatttggttagaaagaatcacaccgctctggcggcgattgagtttccatcaaaaagtaacttatcgtaatctttttcgctataaagcacggatgattctgaccatcttaggcatcgctgggtgtaccggtttaatggttgcaggctttggtttaaagacgtcaattggcgaagttgctgaccgtcagtttaagcaattgacccattaccaagcaattgtgacgcttaaaataccgaatagtacagcccaaacgaagtcgattttaacacagactgagaaggttcggtcttacttaccggtcacaatgacccaggttaagttcaagcaaaaagggattacggatcaagcggcgacagtctgtgcggtcgctgatcaagcaaaacttgcacagtacgtcgctttgcaaacaccgcgagaacaacaacgactcacattgccgaaacacggtgcgattattgctgcgaacctcgctaaaacatatgctgttcaaaaaggcgattggttaacgctacaaacggcacaaggtcagcgtgcacgaattcaggttgcgggtatcagtgaaaactaccttggtaacagcgtctatctccgccaatctgctctttcaaaaacgctacaacaaccagttgcggctaatgcctatctcgtgcgcaccgctaagatgactaccaagcaagaaaaacagttggcgacccgtttgcaacaaacaacggaagtggcggccacaacgtttatcagtgatcaaggggctaagcaagcaacggctagtgctaatttagacccaatcgtttttattttcatcgggttatcagcggttttagcgtttgtcgtcttattcaaccttactagcatcaacgtttcagagcgggaacgtgaattggcaacgattaaagtcctgggctttttcgacaaagaagtgacggcctatattgtgcgagaaaatgtaatcttcaccgttattgggattgtgcttggctttggaatcggtaaattgctgacttggttcatcatcacgatggcctcgtcagaacaagtggcctttccactcatcattccagctagcggctacctgattgcggcagggatgacggtgctattttcactgattgtgatggggatgacccatcgcaagttaaaagggattgatatgattggtgcattaaaggagaacgaataaaagttttagcaaataatgcttttttacttgcttgtgacgttacgtcatcggctagtatcaaggtatggaggtgatattctatggcgcaatatacaacaggtgaactcgctaaattatgtgatgtttcggtgcggacggtgcaatattacgatcaggccgatttgttgaagccggcaagcttaactgaaaatggacgacggctgtatggggatgcgcaagtgcagacgttaaaagtcattctaggctacaagcagctgggcttttcactgaaggcaattcaaaaagtgatggcgagtcaagcttcgacggatacactgacattgctagtcgaacagcaactcaatcagttagtccaaaaagaaacagacttagctaaccagaaagtggcgttgcagtttgtactgcaatcgattcaaaatactagcgcggtgccttttgaaatgacaatcagcgacatagaagacgcaatggctaaaacaacacagttaaaaagattacatcggcgaatgctgatgtggggcttattgattgatggtgtggaaattggcttattaattcttgggtttctaagtggaatttggtggccaatgtggattgggataccggtcatcattgcgatggccatttatgtgacaacattctactatcaagaaactgtctatctatgtcccaattgcaagacggtcttcaaaccacgcctaagtaaaatgttctttgcccggcacacgccaaagacaagacaactagtgtgtccaagctgtggacaaaaaaattactgcatagaacagagtgcgtaagcaggcgttcgtatttttaggattaactggatttgccgaattggcgacgcaatcgctaatttggcaaatttggttagccacagaaatatgcctgctgaagcacgtttaagaacagagtgcgtttggtcgcggttagcaaatgagcattaagacaaaatcaccagtaatccgtttttggagttactggtgattttagcttaagcggaagttgttgcgaccaaaaagcacgtttgaaccaggtgtgcgcatcaaacccaaaaccatctaagctgggacgatttcgtctcagtttttttgagtcagatactttataatagaagtattacaaaaataaggaatgatgcaaatggaaacgacagtgatcatctcgacgctctttcggttggcaaaagtcttcgatgacatgggtaagttattgttcaaagcgcatttagatgtgccgttgacgtttgaccgtgcgcaatcgcaggccttattacggcgcaataaccgactagaattcagctatcaacaacttaaaacaagtaaaataaaactattaaatcaattattggcgacggcgggagccgatccctatttgtgggccaagttacggcgactgcaggcattggatgtggcgagtttggcagccgttcaagcaaatccgcaatttaaccgccaacgcaagattaatcgtttgaaacaactgattatcaatttacaaaatgaaaaaatcaatgagagtacggtactgacgaagcaggcgctcgcctatttataccatatagcccctgataaagtggcggccacgagtaagccaggaccgatactggccgatccatttgatagccgcgcttttaaaatggacatgatggctcttaattatttagatcagtattttaacgtgcaggaattgcaatattacgtgaagtacctcgtgtttattcacgcgcatcaagcggcggaagcggtgattcactatgatgcgcgaacggttttgccgaatgcggaacaaactggtttttcggcagttgcctattacgtcacgcttaatcgccaatcgtatacctacatttcctacaaggggactgaggggacgatggatgatccgcggattaagtcgtttacgcagcggctggataattatgtccgtgagagttatcaagattggaagtataatattgatgcgatgctgattggcaataccgaaaatgatgagcaactccaactcgcacggcggtttacgcggtatgtggtccggcgggtgcgccgaattaatccggcaacaatcatctatggactgggtcactcactcggggggcattttgtgcagacggtccaattattggatgaaccgtttgatggtggctataccttgaatgctgccccggttcagttaaaacaaataaagcattatcggccggatcttttatccgcttcaaaatggcaacaattattcgcattgactaagcacaacaatacgcaagatccagctgtagcgatgcaagtccacgcgattttggggcacaattacgctacaattgaaaatgaatggttcattaaagatttaacgcggatctattttggctttccgtatacgttctacattgggacggtgcgctatttgaatgctaaaaattggcattacccgtttgtgactgacgtagcaccatatctccgaaaagatgagattcaggcgtatagccagttctggggtaatctaattcgctatttgaaacgtgttgagactagaaatgggtcgttgatgttggcaagtctgatgacatatggactgcagacactccgtgaagtgtatgccgcgattaaaacggaacaggcccaacagatttttgcggcatatgcgcgctatttatacgatgcgcatatttttaaagacacccccgttcaggtacaggccaattttgaacgggaattatcacggccgcgcacggcactccgtgtgttacaaggcgaatggccatttttaaaaagcgtcaacaatgagatggtcgaaacggtgattttcttccacacgattgaaggcgctcaatactttacacgctagacagatgggatgttaactaatggatatttatttgaaacaagcaattttacaagtggtcgaccgcgaactcggcgatccaatttactcacaacaggtgctagatctcaccaatgggaacacacgcgactatttaaccaacaagattaagaaattatcgtctgcccagagtaagaccggcgtgctacgccaagatgctgagctcgcatcttttctgcgcgatgcgacagctgattttatcggcgctagccaacgcctcgttgaaaaatggtacacggtctatcagaaaagtgacgatgcaccgagtgcggatgcgtttgttgtcttgtatgaacaagatgcccaagcttacttggcttttttgaaggtcgattatcatcaagccttcacccattatgtcaatgctgaagaggggccattgatgaatcaactgatcattcaccaatcgattctatcgaataagacccaaaaggcggatgaggggttcgcgattaacctccagacgtttggcttcgaattgatggagaagaagtacaccttctccggtgaaaagatgacctatttatcaacgaacgtgattgaaagcgaaccagcgccatcgctagaagaaaacgtcaaggtcgttaaaaaggccgctgaaaaaatcggcaagaagttcgaagttgccaaacacgatgtggtcgccaacgtcaaagaagccatctacgatacaatcgaaaccaatggtgaaatcgacacgagccagatggcagcgaagatttttaaagacaacgtttcagcccaaagtgagtttaaagcagaaatgacggaaaacgcgccagcagcaccagcgccaatctcaccagccgtccgcgaaatcgccgaaaagaaatacggcaaacaaaaactcaaactctcaaacggcatcgaactaatcgtcccaatcgacgtttaccaaaacccaaatctatttgaattcatcaaccacccagacggcacaatgtcggtggagattaagaatgtagaagaagtgattagtagattatagagtgcgtaggcaagcggttatattttgagcattaactggatttgcccaattggcgatgtaatcgccgattgggtgaatttggttaagtacagaaatatgcttgccgaagcacgtttagagtgcgtttgaagcgggtcgactttgaggattaacctaaaaatgtgacttatgacgggtttggtcataagtcacattttgtagttaaccggaaaagccagtttcgaaaagcacaccaaaaaagagcatttctctcatcctatcgagaaaaacgctcttttactatgcctttctttttgcccagattaaacggataatcttatcgaattccgtgatgattagaatcaagaagcctgcgccgatcgaaacgccccattctaataaggtaagcggttcggtgtagaaggtttgttgcatgaatggcacgtaggtcaggatcaattggagaataatcatcagggcgataatgccgaatgccttttggttggtgaagaaagcttttgaaaaggcgagtttcgcagtccgaatattgaacaagtagaaaatcttgctgatgacaatgatattgaccatcattgtgctggctgtgacttgatcgacaccgcggccgagtaaccaatcgtaggctaacaagccgattaaggccatcaagacggaaacatatgccatttggaaaacatcgtgtttattcatcagcgcttggccggtcttacgtggcttgcgggtcattaagccatcttcagctggttcgaagatgaaggcgaattgaatcgtaatcgccgagaccatgttaatccagagtaactgcgtcgcttgcaacggcatatcttgttgcatcaaaatcgtgaaggcgatgattaagccttccgcgaaggaagtcgggagtaagaagagaatactctttttgatgttatcgtaaatccggcggccttcacgaattgcgacggacattgttgcgaagttatcgttggttaaaatcatatccgcggaatctttggcaacatcggttcctttaattcccatggcaaccccgatgtcagcgcgcttcaatgcgggcgcatcattgacaccgtcaccggtcattgcggtgactttgcgactggcttgtaaggcttcgacaatttcgagtttgttatgtggtgtggtgcgggcaaagacttggtgttctaaagcggcttttggtttttcagcgtccgacaagcgatcccattccggcccggtaatcgcattaatcgttggtgctaagcctaacttttcaccaattgctttagccgtcagtggatggtcaccggtaatcatcttgacatcgaccccagcagcgttcatttcggcgagcgcttggatgacttcatcgcgtggcggatcgataatcccggcaacccctaagagttgaatcccttgttggagttgttcatgggtaattgtagcagtcgttgttggcacgtcgagataaccgaccgccacaacccgtttgccttgttctgataaacgggtcacatcggcattccagtcatcgattgggaaatcgaccattgcctgttgggccattgggaataatttatctggagaccctttgatatagattcggtgcgtaccatcagttagttgcacgagtttagcaatgtagcggtaatccgaatcgaaaggtaacatgtcaatttctgtatttgttggtaagtcgtcgataccatgaaccttatgatataaggttaaaaaggcaccgtcagttggttcaccgttaatggtccaaccattgtcggcttgataaagcgtcgtatcgttggcttcataactagcctctaagaattgtgtgagggtggtatccaattcagcaggttggtcatttaataaaatctgaccttcgggcgcatagccattcccgctgacttggtaagtcgtttcggcggtgataatttcggtcacggtcatttcgtttttagttagcgtccccgttttgtcggtcgcaatcacgtcgacggagcccaacgtttcaacggcaggtaagctcttgacgatggcgtgtttgtgcttggccatgtcgctgacccccattgcgaggattacggacattgttgcgggtaatccttcaggaattgaaccgaccaccatcgtgacaatcgcgattgctaatactgagagtgagtaatgttcgccaagtaagccgaagaggaataaaaagacggccgcaccgatgacgacaaatgaaacgccggtccctaagccgttgatttcgcgagtcaatggggttgggcgggttttcgtttcggtgacagcaactgagatttgcccgatttcggtatcagcggcggttgcgacgaccacgcctaagccgctcccgttagtgacggaagtggaggcaaaggccatgttgacttgatcggcaagggcaacttcttcttcggttaagcgtgttgcaattttttcaactgagtctgcttccccggttaaggctgattcttgaatacgcagattatcggcatcaacgattcgtaaatccgctggtacactatcgccagcttctaggaagataacgtcgccgaccactaagtcttcagttgggatgtcgatccgctgaccgtcacgataaacggttgcttcggttgccaacatttctttgattcgttccaaagcatcagatgcgttcgcttcttgataataaccaatgatggcattaatgatgactactagaccgatgatgatggcatccgaatagtgacccatcatgagtgttaatagggctgcgacgattaggatgtagatgattaagttgttgaattggcgcacgaaaagttgccacttcggggtgtgatggctctcgagtttattcggaccattggttgctaagcggttagccgcttctgtttgcgaaagcccctgttcaaaatcttggtgggcataattggtttgcagttcgtctaatgtttgttgataagcgtgtgttttagtcatggtaagctccttttaattatcgaaagtcaaaatgcggtcgttcgtgatcgttattcttgccgataataaggaataatctgatgaattaaacaaaacgcttcgtccgagccgtcatccaaaaatactcacctccagttagttattactctaaaattatcaggaaaaagtagcgatgtcaatctaatgaatactattaccaattcaacgtttaaactttgcgcccagtgcggctttgtggtagtattattacataagttaaaaaaacggttgaagcattgcgcgttcaagatttccttctttagggtggtagaagggaattttggcgtgctttttttatggagggaaatgaatcaatggcaactttagcaattattttaatcagtactttattggcaggacacatgagcaaacggattggaatgccagctgtgattgggcaactcctggtagggattattcttggacccgcgttgttcggtgtcttacatgaaaattcttttatccacacgttttccgaaattggtgtcgtattattgatgttcatcgctggcttggagagtaacctgaccttgttgaagaagtatttcaaaccaagtttagtggtcgccgtcttaggggtgattgtcccggtgatcagtatgtatgggatgagcttggcctttggtattagtcaacttgagagtttattcatcggggtgatttttgcagccacctcagtatcgatttcagtcgaagttttacgtgaattaaacgtgttagaaagtaaagaagggacgattatactaggtgctgcggtagtggatgacttactggccgtaattatcttgagtgtcttgaccagtctttttggggcgcaactggctgcagctagttcaacccacatgagtttggggttgagtttattgctgcaagctttattcatggttgcggtctactttagtgtgaaatggattgtgccatttgttatgcatttgagtcgtcgtttgttagtaccatatgcgagcgccattacatcgttaatcatttgttttggatttgtttggttcgctgaggccgttgaattgagtgcggtagtgggcgcgtttttcgcagggattgcgatttcgcaaaccccgtataaggaagagattaatcgccatattgaaccgattgggtataccgtatttattccggtattctttgtcagcatcggtttatcgatgaacttagcaagcttgaatcaacatattctatttattacgattttaaccgtgttagctgttttctcgaagttaattggaagtggtctcggtgcgcgttggatgaataattcgccacaaggagcctatacaattggtgcggcaatgatttcgcggggcgagatggcgttaattatcgcgcagattgggtacaacgctaaattgttgagtgaactttattactcagagattattttcgtgattatcattaccactgttttggcaccgctgattcttaaacacgcggtgaaacgccaattagcaactgaaatcaattaagaaaaatcgtcagctatttgctggcgatttttttttgcccttttttaaagttgacaaaaaaaggattgagcagtacacttatcacgttaagaaaaacatgtatttaattacattatatgaaggcttttaaaaggacaaaacaatttaaagaattagaagatttcttagggacatatttcatttacacttacgataatgggtggaagtatgaatggtatgcaaagaacgaccacacagttgactaccgaattcatggtgggatggttgcaggtcgttgggttcgtgatcaagaagccaacatcgttaagttaacggacggcgtcttcaagattacttggacagaaccaactgggactgatgttgcgttggacttcatgccaaacgaaaacaagttacacggcatgattttcttccctaaatgggttgaagaacatccagaaatcacagtgacctaccaaaatgatcacattgcactcatggaagaatcacgtgaaaaatatgaaacatatcctaagatgttagtgcctgaatttgccacaattacttatatgggtgatgcaggacaaaataacgaagacgtaattagcgaagcaccttatgaaggtatgattgaagatattcaagaaggccggtatttcgatgctgactatcgcaagattcaaaaataggcaagctgcttgactaatcataaatatttactaattatgacaataagtaaataattgattttataaagcggtttcgttataatgaggtcatggttaaataaattaacgaggtgaactggacatggcgattcaagtaggtgatttaattcgcggccaatcaaacgaaattatgtctgcgacgtagatcggtaaggttattgagaaatgtgaagaaactgtgcatatcttaatcttgaactatgcaccaactgatcgttttacggttcacaagttgatgcaacgaattctagtgaattcacaacaacttcgtgcaatttcgttaacgaaataactccctaatacccatagatttctccctataaaaaaacgaccactcccaagaaaaggtcgttttttttatgcataaaaagcggtctaatcacaaaggcggcgcttgcatcttgttgctcgctcacttatagtgaaagataagtgatggcaggaggaatgtgcagtggttgaaaaaagaaagttaattggaacagatgaaccagcattttatgaattagcacaatatgcgtttaataaaccggatagtgctaagcgccaagaattcttcaaacagttgtatacacatagtgcagggtttggcgtttttgatgacggccggttggcaagtggcttattagcgacgccgtttgacgtacggctcaatgggcaaacctttaagatgagtggcattggttatgtcgcgagttaccccgagtttgcgggcaaaggtgggattgcagcattgatgcaactcgcgtttgaacacatgcgtgcagaaggtgtgacgctttcgtatctcgcgccattttcatacggcttctatcgtcggtttggctatgaacaaacttttgatcagacgcactttgagattcaaacggctgacttaccacgattgaaatttgcaccgagtgcaggataagtagtacggatgacattggcgcaagcggtgccgttgattgatgcgttcttcaatcagcatccggacaatcaagtcggtggtgtgcagcggactgattggtggtggcaatatgatgttatgaagcatagtgattgggaagtggcggtctattgagaagatacaggacgggttgcggggtatatgatttatacgcgccaaccagagacgtttgtgattcaagaactgatgacctcgacagttgcaagtcaagaacagctattgagctttattcttaagcatcagtcagcttatgcgacaattcagtatgagagtgcactgactgagtcgctagctgatttattgcctgatcccacaatcgtaaagacgacaaccgtcccttatatgatggcacggattgtgtcactagctgatttcttcgcgcgttatgcctatcaagtagcggaactatctgcggtaacgattgcggttcaagatgatttcttacctgaaaatgccggtttatggcagttaagtattcatgcaggacatgctgctgtgacaaaattagcaacggggaccgcagacatcaccgttacgattcaaaatctaactaaggcgatgttggggtatcgcacacttgagagtcaagcacactttgggcatgtgcaagggacaccgcagcaaatcgctcaactcagtgctgcgtttagtcatacgaaaccgatgttatgggattatttctaaattgaacatcaaaaaaagccaatcatccaggtaatatctgaatggttggctttttttaattaagcaagttggacaatctgcacgttggcatttaagacaccggcagaggggatgtcacaatttggcattgcgacgtctaattgttgtgagttagaagcggcgaaggttccggtatcgttgacaacacggtaccatacttcaccggtacttaatgtgatcttgatttgtgagccgcgggggataacgcccaagtgcgcagcgactccggcgtacattccaccgggcatacttgttgcgccaaggaccgcgggatcgtaaaaggttaatttgaatgtccctttgtcaattaaggttggttcggcaggtgctggggccgcaactggttctggctcaggggcgggcgttggttccttaatttctgcggaatcaggatctggatgaatcggacagctaacgggtttgtctgttggtagaacagttgcgtgtttgaccagtgacgtttcagctgcttgggcaggttgccccgtgaattgttcaatggctttagatgacatcagcttttggacagggtggttcgtttctggtgctgcttcattggttaatgcggcacgcgcgatattcgttgtaattagcatcagcaatataaggccgatagctaacaagaatggtttgtttttgataataaagcgtcactcctaggtaagttttggaactaggagagtatatcaatgctgcatgtcaattaaatagcagtttctttacagaaatggggtaatttgtcatgttagtcatatgtttgtaaaatttaggaacttaattaaagggcgtcacgatggcgttgatcggcagtaagacgcgaatgggaatgctatcatgacgattactgttaaaatgacaaaaaacagggcaactatcgtaaagatagttgccctgtttttaagaattagatgagaaaatagccgaatacccctaaaatgattaagaataagaagttcatgccagtgaaaacgacaaggaacttaccaaggtctttgccccagcctttcttaaatcgtttgtaagcaatcaagtttgcaagtgaggcaaacattgtgccgaccccaccgatattgatggctaagaacattgcgtggctgtggttagtgaagcttgaaagtaaaatttcagttgggacatttgcaatcaattgacaactgataatcccggtgatgtaggtttgttttgctgttccgacaattgatcgcatgaatgtggcaatcgttgggatgtgacttaaattcccaacagcgatgaagaaacagaagaatgtgagtaataagccgtaatcgactgttttgaataacttaggatcaaacgctagaatcgcgataatcactagaattggtgtcacccataatggaattaatgagaacactgcgaggaaaacgacaaccgttaatggaacgaaataccacagtggccctttttcaacttcaacgggatgtaacccgtgaagtttgatgggttcttttggaaagaggaaggtcgttgctgccaacataatgacgctgacaatcaagacgggaattgaatattcgaagaaatggcgaatcgtcatatggtaaaacgaaacaaggaaaatattatgcgggctcccaaacggtgttaatgaagaaccgaggttagccgaaatcgtgatgagcgtcaccggtaagattggtgaaaattcaagttgacgcgcaattaagatgaataacgggacgaacgttaataccgtcatatcgttggttaagaacatcgcgccgacaaacgttagtgctaataacatctgcatcaaggctcgtttggaacggcttttgataattaactcgcgagcgaagtaatcaagcacgtggagccgttgataaacttgaacgagcgtcataatacaaaagacgctgacgatcacgtggaaattaacgtaactaagttgtgggcggttgaaaaatgaggtgacaatggctgcgatggcagcggctaagagtagtttgtcatctaagaaaaaatctcggatgttcaaagcaatgtttttcatatagattcaattatccttcttaatatagttatattattcaaaaaagcactactacaattctagactgtttacggggataaaaacagaaaaatttacaatatatacacaatttttacaatacatagcctctcattctagtaaacgtggttgactgtctcgcttgacgttagcggtttttaatttgaagaattaagtgattttactgcttattgcggctaaaattaggtataatataaatgaaatattggctactaagtgggtaaaaaaaaccgttaaccaaccattagcaccctaaaaaaacctaggtcagacaaataatagttgtctgacctaggcttttaaagtgataatttaatcgtttgcgccacagtcttaggaatcccgagtgcttcgagttccgccactgaagcttctttgatatgtttcatcgaaccaaaattcttcaagagtttcgtccgcgtcttaggaccaacccccttgatgtcatcgagtttagaactcaacgaattcttcccgcgtaattggcggtggaaactgatggcaaagcgatgcacttcgtcttgaattcgcgttaacaagtagaagccttggctctttggatccaactgaatggtttgatcaacttccccatataacaacgaggcggttttgtgatgattatccttgaccatccctgcaacgggaattgatagccctaattcgttctctaagacgtctttagccgcattgagctccacaattccaccatccattaaaatcaaatcaggcagtggtttatcctctttgagcaatcgcgaataccgccggaaaatgacttcccgcgtattggcatcttcgttggcgcctgcacgatctgtcgtttgcgttaacttatacttgcgatagagtttcttctcggcacgaccatcaacaaacgtgaccatcactgagacaggatcagtcccttgaatatgtgaatggtcaaacgcttcaatcacgtgtccatgtggtaagccaagcgcgtccataatctcatcttgcgccccaacggtcttgcggttgtcgagttccaataaacggaacttctcttccaacacaagccgactatttttctgtgccatttccatcaacgcttttttctcaccacgttgcggcgtgcgaatcggcacattcaaaatttcggtcaggactttcttttcgaccccttctggaaccagaatttcgcggggtaacacattattcttgcggttgtaccattgtaaaataaaggttgccaattcttcttcaggtgtgctgacacacgggaagagccgcttttcacgccgaatcaaccgtgcttggcggatgaagaagatttgaatcgataaccagcccttatccaaataaaaggcaaataaatcgcgcggggtattatcgttagaaataattttctgcttttcaacggtggcttcaatgtagtggagctgatcgcgcaattctgcggcgcgttcaaactgcatctcttcagcagccgtagtcatcttggccgtcagttcttttttaaccggatcaacttgcccattcaagaaacgtttaatctccttgatttgggccgcatagacactctcaggcacttctttgaaacacgcgcccaaacattgacccatatgataatacaaacagggccgcccttgatgtccctgacagcgtcgtaaaggataaacccgttgtaagaatcgcaatgtttcttgggcggcatacacgtccggataagggccaaaataaaagccgccatcttttttgacatcccccgtgatcagtaggcgcggatcgcgttcattcgtaattttaatgtaggggtagcctgtgccccgcttaagtttaatattaaagtaaggttggtgtttctggattaacgtaatttccaacaaaaaggcctctttatttgtcgatgtgatgattgtttcaaaatcgacaatttcagagaccaatttggccgtttttccttcgtgactactcttgaaatacgagcgcacgcggtttttaagattttttgctttacccacatagataatcttggcattgatatccttcatgatataacaaccaggtaatgcaggtaagagtgctaatttatgttcaatgtgttcgcttgccaaaaacaccactcctttaattcaaaacaagtgttcgtctttctattttacgtgtttttggctaaattgcaactattgtgctaggaccttggctaaaaattgttgcgtccgttcttcttgcggatggtcaaaaatggcttcggggtcccctttttcgacaatttgactatctgccatgaaccagacttcatccgccacttcgcgcgcaaaccccatttcgtgggtgacaacaaccattgtcatcccttcttgtgctaagtcttgcatgaccttgaggacttcgccgaccatttctggatcgagcgcagatgtcggttcatcaaataacaatacgtcgggtgacatcgctaatgcccgcgcaattgcaatccgttgtttctgcccaccagagagttgatcactataagcatccgccttatccgctaaaccaacgcgttcaagcaacgcttttgctttagccgttgtttcggccgctgattctttcttcactttttgtggcgccaacgttaagttatcgaggacagttaaattggggaaaaggttaaagttttggaaaaccatccccatctttgtccgaatctgatcaagctgtttttcagataacgtcatcaaatcggtgccttcaaacagaatttggccactcgttgggtcctctaaacggttcaagcaccgcaataacgtactcttacccccaccggaagggccgatgacaacaatcacttgaccagcttggacttcaccactaacaccatttaacacgaggttgtccccatattttttaaccaattgattaatcttaagcatgttgcatcttcctttccacatagttcaaaagtttcgagagactaaaggtcatgataaagtagatcaccatcgcaacaaaaatcggtgcaacgcctttataagttgctgattgaaccactttgagttgataaattaaatcagtgaccccgataatggaaacgattgaactttccttgattaaagaaatgaattcgttccctaaagcaggccagatattcttcagggcttgtggtaaaacaatgtaacgcattgtatcgcgttgtgacaagcctaaacttcttgaagcttcagtttgcccagcatcgatcgcattgatccctgaacggataatttcagcaacatacgccgcactatttaaggaaacggcaattacccctgccaaaagtgctggaatgttgacccataagccaatcccgaagtagacaaacatgatttgaatcatcaacggtgtgccccgaacaaattcgatatacatgactgccagcgcacgcaccaacttattcttggccaaacgcccaaaggctaggaggaccccaattaaaatcccaattgcaattgaaacaatcgtaatgaataatgtgtagccaatccctttagcgaagtatgaccaatagtgccacatgctagtgttgtgcgtattgaccttcatgagttggcccgcgttctttaagtattgcggaattaatttttgctttttaatttgcccgatactcttattagcagcagcgactaaggttggcgaatcctttggaaaggcaatcgctgatccttgcatgtctgcgcctaaatcaaatttcccattaatttgaacgagttctggatcattacttgcataggcggttgcgactggttcttccgccacaatcccgtcgattttatgactctttaatgcaaggacgagatctgggactttggccaagcccgtaatctgcgcatctttaatttgctttttagcgagtgtttgttggagactccccgtttggacccccacttttttcccgttaaaactatttttggagtggtaaatcttcgcatcagctttattgactaagattgattgaccaccgagataataaacatcagaaaaatcaacactcttgcttcgttcatccgttggtgacatcgccgaaataaccatatcgactttaccggtttccaaaccaaccaataacgcatcaaagtccatcgacttcaccactaacttaacgcctaaatcatcagctagcttctgtgcgacttgaatatccataccgacaatcttgttcttaccgtttttattcactaaaaattcataaggtgcataatcggggctggttcccaaaaacaacgtttttttagcttgcacttggctaaccgtctgtccagctgccaaaacgggctgctgctgaatcatgaaaaacgttaacattaccatgaatggtaacccaacaaaagtgagtaattttttaatcgtcatattatctcctcctctgattagtactatcatacaaccaattaaataattatgcaatatttatttataaaaagtgaatcattggcgaaaccgttattatctggtatgatagatgcaaattagaaaagagggattacgatgggcttaaaagtcactaacaagaccgatttaaccggtttattcgataaattcgcatcactaccagaagaacgccaaaaagttgaagcacaagttgaagaaacagctgataaattaaaaaaggtagatgcagaacaaaaagaaaagcattaaacaaagacagcaaaaaaggcggtaagacaaattcatttttgtcttaccgcctttttgctggtttaaacgtgcgtcatttgcaatcgcctttcggttaacgcgattgtacgctttattctgcgtgtctttctgggtagcgttgttttaattgttcaatgttttcgcgcgcgactttatcaaagtcgaggttattccattccgcaatttgtgataaataccaaagcacatcgccgattttcttagacattattttttcatctagttcgtggccttggaacgcatattttttaacgatatcaaccacttcaccactttcacttgctaagcccaaagctaagttagttaacacttgttcgttaccatataacgttcggttggctaacttttgatagtcattaaattccattatgcttgtccccctattgcacattgcttttcaatccattcccaaactgtctctttaccagcaccagtcagtgcgctaaagcagacaaattgatcgactggattaaaatcaagcgcttctttgatgattttttcttgacgattccattttcccgttgagatcttatccatcttagtagcaaccactaaaacagggatatcataatacttcgcaaaaacgtacatcgcgatatcatcatcggttggttcgtgacggccgtcaattaatgaaataagcccctttagatttgagcggctggttaaataagcctcgataatttgcccaaacttctcacgttgcttctttgaaactttggcatacccataaccagggacatcgacaaagtaaagttcgttttcaacgcggtaaaagtttaaagtctgtgtcttacctggcttgctagatgtccgggcataactcttacgattgattaatttattaatcaatgaagacttaccgacattcgagcgaccagataacgcaatttcaggtaattgatcagttgggtactgcgaagcagctaccgcactcatcaccatttcaacatcatgtacttccataataacctccgattatttccttcgaatgttagtttagcataaataaataattattgcgccgttgacatctctctagtttcatggttaacatatcttcttaaccccgttaaatcgcgtcattgtaccgtttcaaaagtcccttaatgcaaaaaaactgccgcgacaaaatctaatttgtcccggcagtcttttaatttttatgacgcttcttgtccgtcagctaaaaagagttgtgggttggctgtgccatccaccgcttctttcgttacaacaactttagccacgtcttcacgacttggaatatcaaacatcatatccatcatgacttcttcaatgatcgaacgtaaaccacgggcccccgtgtttcgttcaatcgctagatgtgcaatcgcatggagtgcttctggtgtaaattctaattcaacattatccaaggccatcaacttgctgtattgcttaacgagcgcgttcttaggttcagttaaaatatgcaccaaatcatcttcagtcagtttttccaatgcagcggtaatcggaatccgaccaatgaattcaggaataatcccaaatttcattaaatcttccgttacaatttgttgcattaagctttgatcttcattggtagtttgaccattcttgcttccaaaaccaattgtcttttcacctaagcggtttttaacaatcgtttcgatgccgtcaaaggcgccaccaatgatgaataaaatattggtcgtatcaatttggattaactcttgttgtggatgcttgcgaccgccttgaggtggcacactagcaatcgttccttcaagaatcttcaagagggcttgttggaccccttcaccagaaacatcacgcgtgatcgagacgttttcactctttttggcaatcttgtcgatttcatcgatgtaaatgatcccgcgttcagcacgatcaacatcgaagtctgcattttgcaacagcttcaagaggatattttcaacatcttcacccacgtaacccgcttcagttaaagtcgtggcatctgcaatcgcaaatggcacatttaaaatccgcgctaaggtttgcgcaaggaatgtcttcccggaaccagttggtccaattaacgcaatattactcttttgtaattcagtatcgccttcttcggccactgacatttggttgacccgcttgtaatggttgtagactgcgacagataaagcttttttcgcttctgtttgaccaatcacataatcatttaaaatggctaaaatttcttttggctttggcacttctagtaaatcactgaaggcctcatctttaaactcttcatcaataatctctttgcaaaggtcgatacattcgttacagatataaacaccagggccagccacgatctttttcacttgatcttgcgacttcccacaaaacgaacacgttacgggtccgttagttgtttctgtatcatctagcatactgggattctcccctttctcgatatacgcttaccgctgtgagtcgttaaaatacacccctacaacgtaattcagactatagcataactatggtctagaataaagtaaagttactcgcacaccgtcaatgacacaaaagcgggtccaaagtaaacaccttgaacccgctttttagcatcatttaaagcttggattgatcagacgaccttatttagcgtctttcacttctacagctgaatcagcaatgatttcgattgctttcttaacaccgatatcatgttttaacatgtcatctgataagacgctacgaacagcagcttcttccatattgtattgttcagctaaactcttaagttctgcagcaacttcttcgtctgttgcttcgatgttttcagcttccacaacggcttcaagtacaagacttgtcttaacgcgtttgtcagcatcaccagcgaattgtttcttcaaatcatcttcagttgtaccagtgatttgatagtacatttccgggttgataccttgttgttgcatgttacctaagtattgttgtaattgactgttgatttcttcgtcaatcattgcttgaggtaattcagcgattgttgcattttcagttgctttagcaacggctgtatcttggatagcagcatctgcagcatcatttttttgttgttttaattcttcacgaattttttcttttaattcgtctaatgtatcaacactttcgtcgatatctttagcaaattcgtcatctaattcaggtaattccttagctttcacttcatggattgttaccttgaagatggcttctttaccagctaattcttctgcttggtaatcttcagggaaggttactttaacatcaacgttgtcgtctgctttgtgaccgactaattgatcttcgaaacctggaatgaatgaatttgagccaagttctaatgaatagttgtctgcttgaccaccatcaaaaggtacgccatctacagaaccagcataatcgatgacaacagtatcgcccttttcagcagctgcgtcttcttttaataccaattcagcttgacgttcgcgacggttttcaatttcttgatcaacgtctttgattgtaatgcgacggctttgttttggtacttctaagcctttatagtcgcctaaagttacttctggtttaacggtgacttgagcagtaatcacccaaggttcgcctttttccattttttcaacattaatttgtggttgatcaactggttgaatagcagcttctttaacagcagcatcataagcttctggtaagattgcatttaaagcatcttcataaagggcttcttcaccatacatcttgttaaagatttggcgaggcattttacctttacggaaacctggtgtgttgatatttttacgtacacgtttgaacgcaacgtccaaaccttcactaattttatttaaatcaatttcaaaggttagttcaccatcattggtgccctttttttcccattttgctgacataatttccctccgacagttatattcacaatctatcaattgcatacttaatcagcataaactatttaacctaaattgtaaatatttattggtctaaaaagcgataaaatccgatattttagtcgtttcaggccaacttttatcgaatttaatgcacaaaaaaactcgcagtttttacactacgagtttttcgattcaactaggttgaatattagtcgataatttcactaacgacaccggcaccaacagtacggccaccttcacgaacagtgaacttaagacctttttcaatagcaactggtgagattaattcaacagtaaatgttacgttatcaccaggcataaccatttctacaccttctggtaattcgataacacctgtaacatcagttgtatggaagaagaattgaggacgatagtttgagaagaatggtgtatgacgaccaccttcatccttgctcaagatataaacttcacccttgaagttcttgtgagtttggattgaacctggtttagctaaaacttggccacgttcaatgctatcgcggtcgataccacgtaataaagcaccaacgttatcgccggcttgaccttgatccaatgtcttacggaacatttccaaaccagtaacagttgtcttagcaacttcgtctttcaaaccaacgatttcaacttcgtcaccgacagtaacttggccacgatcgatacgacctgaagcaacagtaccacgaccagtaatcgtaaatacgtcttcaacaggcatcaagaatggtttgtctgtgtcacgttctggagttgggatatattcgtcaacagtagccattaattcttcaacagctttaacgtcgtcagcattgccgttcaatgcaccaagtgctgaaccgcggataactggaatatcgtcaccagggaaatcgtattctgataataattcacgaacttccatttcaactaagtccgttaattcgtcatcatcaactaaatcagtcttgtttaagaagacgatgatgtagtcaacaccaacttggtgagcaagtaagatatgttcacgtgtttgtggcatagggccatcagttgcggcaacaactaagatagcaccgtccatttgagcagcaccagtgatcatgttcttaacgtaatcagcatgtcctggggcgtcaatatgtgcataatgacggttttctgtttcgtattcaacgtgggctgtattgatagtgataccacgttctctttcttctggagcagcatcgatgtttgcatagtcttgagcttcagccaagcctttgtctgccaacatctttgtgattgctgctgttaaagttgttttcccatgatcaacatgtccgatagtaccgatgttaacgtggggttttgttctttcgtaatgtgctttttctgccattaaaacgaacctcctgtattttcgcaagaaaaaatcagtgtttagatttactaaactgataatcctttacataatattataatacttcaagcgctaaaatcaaagtgtttttttacacttgaagaattcaaaaatgattatatctgctatgagcgcgtttgtaaacacttaatgctcaaaaaaagtcagttttgaaacgatatttaggtgttttctactctaaaaatcaagtttccctgtcatttcttgcaactttttcacccagtcctgtatcttttctgaaataaccactgacgcggtataatccggacccagtaactgtttgagccatgcttgcgcccactccgtaggattatacatgatttcagcttcaaaaggatataaatatgcaaatcccatctcaacatccgccatcacttgtgctaacaaagtcggatcttcagtggctaactgctcatttaacgccgctaacaccgcattaaacgtcgggctctcctccatcaattggatatcggcaggtacaaaagtttttgtctgttcaaaccattgcatcgtgactaattgttcaatattcagctggacgagcgtttcaatgacagtcgtcttcacgaaagcatgactgtaaggattcgttaaaatgggcgcaatactggtgacataaacattacgtggtaattgttcagcctgcgtcaacattgctagctgttcagctaatgggtgcgcagtgaggttatagaggccctctgcttgcttttgaatcgctgcttggtgattcgcttggtattctaattccgcagccgtaatcatcattctaagcgtcttaatgacttgcggggcaatcgtcgcatggcgtaatgcctcccacacttgatttgccgtaataaaacggtggttattcagtaataatgcaagataaaaccgcactaaatctgtttgttgtaagtagtccgcttgttgttcttcgacgattgtcaatgctgtttgcggatcaccagcttcaatcagcgcactggcccacaataaattcgccgacaacgtctgttctagttgatacgcagcttcaaaatggtcgcatgcttgctgccaattttgttgatttaacgctactttccccatccgtatcagccgatcatactgatctggaaattgcgtaatgtcacccattcaatcacttccttttgacaattaataaaacaatagcgcctagaatcaactgacctgatccagacgctattgtttctaaatgttattcagcggctttttcagcctttggtttattatcttttctttgacgacgatgattttgattaatttccataatcactggtagaatcactggccgacgtttcgtttgttcatacaagtaatgacttaagttttcccggacatcttgtttcaaatgactccagtcaaattctttgttgtccagattattttgcaccgcatttttgataatttcggcactctcagccattaaatctttgctagtcttcacgtaaacaaaaccacgtgcggtgactttcggttccgcgataatcttcttattcttgcggtcaatcgtaacaacagcgataaaaatcccgtcttctgataataatttccgatcgcgtaaaacgatattcccgatatcgccgacaccgctaccgtcaatcatgacgtcagttgcgtcaacttgtccgccaacatgcatcttccctttttcgtaagcgacaatatcgcctttaccaacgatgaaaatatctttgtaatccattcctgtttcatgagcaatatcagcgtgtgctgctagttgccggtattcgccttgaacaggcattaagaattttggttgcattaaattcaacattaattgcaagtcattcttattggcatggcctgaagcatgtaaatcatcgccaaccgccttaacttcgccacccgcacgataaatcatatctttggtcttcgctaaaatcgtttccatcgcgtgtgaaggagatgtcgttaaataaaccaagtcgccttcttcgatgtgaattaaacgatgatgactagttgccatcttttgaagcgccttgattggttcgcccatccgacctgtttctaagatcactgtttgttctggtgcaagtgtgcttaaatctttaggttggaccaagatatcgtcatctggcaaaataatcatcgataatttcattgctgtccggacgattttttctaaatcacgacccgttaaaaccactttacggcctgttttataagccgcatcaatgacttgttgaatccgcataatatttgaagccactgaagccacaatgatccgacccgtttgatacttgaacgtttctaagatggattcagcaatatcgcgttcgttagccgttgcaaatggtgattccgcattagcagaatcactcaagagtgctaaaacaccttgtttgccaatttcagctaagcgtgcataatccgtttgatacattggcattgctgattgatcaaacttaaagtccccagtataaacgacttgtccttcatccgtcttaacgacaatccctaatgaacctggaattgtatgcgttgtcttgaagaatgaaacggttgcgcgttcaaaatcgattgctgtattcgcatcgatgacgtggaagttttggaacttacgtaattttggttcgctgctaaccgtaattttagctaaagcaatcgttaattcagacccaaagactggtacatcatgttcctttaagaaataaggaagcgctccaatcgcatcagcatgaccatgtgttaggaaaatcccagcaacacggtctgcattttcttctaaataggtcatatcaggaataacgatatcgatccccaataattcagtttctggatatttcaacccacaatctaatacataaatttcgtcgtccacttcaacaatgttcaaattcttaccgttttcacgaacaccgccaagtggcataatcttaatgttactcattctttcacctctagcacttgaggaatttattccccaaactattttgtttgttttagtcgttcattcgtttaaaactcatccgccttaaagtctaactcatattttatcacaatttaaacaaactaacagcttttgattactaaaagccttttgagcacaaaaaaagcgggtccgcataacggacccgctttttgaaaatgaattaacgacgtaagccaaggctcttgattaattcacggtaacgttgaacatcgctttcacgtaggtaacgtaataagttacgacggtgaccgatcttcttcatttgaccaacatatgaatggtgatctttcttgtgaacagataaatgttcgtttaatgagttgatttctgcagtcaatacagcgatttgtacttctgctgaacctgtgtcgccttcgtgacgagcaaattggttaatgatttcgttctttttttcttgtgaaatagccatgctaatttccacccttctggtataatagcctagaacaacgtaaagcgtcgggtgaacgtcgctaaacagagtagtaggcctgtgcaataagcacttttcaagtttactaaatattagcgtcaaaagcaaggcacagtttcaaactatttaagcagtcaagttgaaatactttacaagtttttattgcaatcactctcactattttggtataataacgactgttgaaattaaaaatcttttttataaagatagtgaaacccatcggaggtgaacaacatgccacaaattaaatctgctatgaaacgtgtgaaaacaattgaaaaagctaaccaacgtaacgcttctcaattaagcacaatgcgttcagcaatcaaaaagttcaaagctgctaaaacagcaggcaacgaagaagctgcagacctattgaaagctgctacacgcgcaatcgatatggcctcaacaaaaggcttaatccatgccaacaaagctggccgtgacaagtcacgcttaaacaaaatgatggctaaataatttaaccacaaaaaagcccccacaaccatttggtttgtgggggctttttttgctttaagcaacatcatctgtcgcaaattgtaacataaacagttcaaacaataaggttgcttcaccttgcccagtctttattttttcttcaatgccctctaaacctagataggcttgggcaagcgtcgccttagaaaagtgccgaatttgttgcaatgctaatttgatgcggtatgggtgaatttttaagacgctcgccaaattaccttggctataccctttttcaaaaagaattttcacttggagtaacaagcgaaattggcccaacaagatggcgttaattttcagcggttcttctttttgtagcaataaatcgtgatacatctctaaaaccggaccgacctttttttgtaaaactaacggcaccaattcaaaaacattatcttcaatactacttgccactaatgcactaacggccgtttcagtaatcacccggctttgttgcgcgtaaagcagtaatttgggtaactcagccataatctgactgtaatcaccattagtcttgcttaacaataacgtcattgccgctggttcaatcgtgacttgttcactttgcagttgcgctgtcactaactgctggacctggcgctcattaatcttttgaacgtcaatgacagttgccatcttcttcagttgtttaacaatcttcttgcgttcatccaacttcgcgtatggcgcgaagataacgagtgccgttgtcggttgtggctgttctaaataagcttggaatccttttaaatcatgatcaagtttagttttaactttttcacctgttaagaagaatggattctgcataaaaacaattcgtcgctcaccgaaaaagggggccgattccgcatcttctaatgcccgcgccacctccgtctgggcgagatcataactcgcaaagttcatcgtcatttcttctgtcgaaagcgttgctttaaataacgctctaacctcttcaatcagcgctgactcttgtcctaatacgagatacaccggtgcaaacgttcctcgattcagtgctgtttttagttgttctgtcttcatttagtcacaatcctttagtgttgttttaatcattggcacttggccaaaaccatagcgccattccagcatcccacagtcagccgtattccaaaatgggacgttcgcacgttttaaagtctgcaacgttgcgacatgtggatgaccataacgattatggcgtcccgcagaaatcaacgccccttttacctgccacgtcgcaattgacttgggatcactcgccgtttgactgccatggtgacccacctttaggtaatcaacacgtaattgtgggtagcgatcaacgattgccacttcacccgctttttctaaatcaccagtaaataaccaactcgcaccaccaatttgcgtttgcaaaacgagtgagtcagcattcccgcctggtccggccaccactggcgctaacacattgatttgttggtgaccaatcataaaatgttggtccgccaaataaggctcaattgcaacttttgtaagatgcggccgcacttgccgttgaaactgccggttttgcggtaagcccgcagcacaaatcaaccgtttaactcggatatgttgcataatttcatttaagtcccctatatgatcagcatcctgatgcgataatgcgattgcctctaaatgatcaatgccacagctgtagaggtaattaactgttactttttccgcccgactcacaatttgccgccgttgccacttttcttgcggtaaagctagtcggccgccggtgtcaattaacaggttatgtcgattgaagggttgttgaatcaacaggctatcgccttgcccgatatcaaacataatcacgcggccaaccggattaaagtggataccaataaaactaatgacatacaggctgataacagccccccagccccactttgctcgccgaccagtacttgccatcaaccatagtgtgcctatcacaattaaaaagagtggtattagctggattttaccgaaagtaattgtcgcatatgggaacgttgcaatccaagctaatcctttatacagcgtcgttagcaggccttcttctaaccaaactatcatatgactaacaggccataagcaaatcgctaccataatcaaacccaacatgactggtaagaaaatcggcgcgacaatcccattaatcaaaatcgtcaagatatgccaacgataattaaaccgcaagcacaccggtaaacttaacaagcctagccaaaatgccgttgtaaaagtaccatggcgccgctgataaatcaatccaaaagccatcagatagctcagcaatccccccatactgattaataaatacggctgccataaaagattgaccagcaatacccaactccaactatctaaacgcgattgctgaaaatgacttacttcgcagattaatcgtagtaagatcagcccgatagcgcgtgtaatactcgtgcctccccccacaaacaacgcataaaggggtagcaaacaaaacaagctaacattcacccattcacgcgggactcgacacagcgttgccaatcgacgaatgattgtcacaaagtagaatacatgcaatccggataaactcaataaatgaataatccccaattgacctaacacattctggtaggccaggccatctgactctcgaacaccacataacaacgcctctgcatgaaaactcaacgctggtggcaattgtcggagataaatcagcccctgttggcgccgttggtggaaccaatctagccaaccttgtggtggaatgcgtctaaagaccgttccgtcaattatatttgcttgataaaaacaatgcttttgctgccccataaagcgcgcatagtcgaactcattccggttagtagcaccttggatacgctctaattcaatatcacccgctaataataacggctgattcgtcgtttgccaacggcgtttttccgctgaactctggcagcgatagtagcaaacaacacgttggtcatcattctgcccctgcgccattaattgaatctgatcgccagccactttgatcgtatcgggttgaatcttatatacttgattatttggtctaaccggctgttcgtaggtgcgccgtgccagccaaaaacggcaaccgcctaaacacagtaccagtccactgaccattaacacagctggttggcgtaagcaccacagtcgcagtagacacactatcaaaagacagctaaaaaaaagtggtgcttgtcctagtaataacgcatttaaacttgctaaacaaataactggataaacccagttattcttaatcactcagcagtttgttcattctccaaaaagttaacgagggtgttggcgtcattcgccgttaaatcgacttggtccaattcaataccagatttttcaatcaattcatacgcatattcgtcgttatgataatccttttgataatggattttactgatcccagcttgaataattaatttagtacactgaagacatggaaaatgtgtgacataaatttcggccccttccgtctgcacaccaaacttagcgcattgagtcaaggcgttcatctcggcatgaattgttcgtaaacaatgcccgtcccgtaataaacagccaacatcgatacagtgactttcatgtgccaccgaaccgttgtagcctcccgcaataattcgccgattacgaaccaccaacgcacccacaaacaatcttggacaggtgctacgcatcgacaacaagaccgattgaagcataaaatattgattccacggcattctcttttctgacacacgaattccccctttaaagttaatagttttagtatagcaaaaaaataccattcacaaactaattaacacaaatttgtggccgtaattgttcaaacgttttcggcccaattcccccaactttttgaagatcttcgatttgtttaaactgcccttgctcatcccgatatgcaattatttgttcagcttttttaggaccgatgccatttagcgtttgcaattgtgtcgcatccgcttggtttaggttgattttagcatcagttgatatcggactggctcccgcttgattgtcagtcgcagcctgtggctcgtctgccgctttcactaattcttcggcttgcaccgcttctcccttagttggcacatagataataagttggtcactcaatgtttgcgctaagttcaactgactcgtatccgctgcttcggtcacatcccccgcttgtttcagcacctcaaataaacgcgtctttgcaacacaaatcggataaatccctggatgtgccacagcgcctttgatatcgacaaacccaccttttgagacgcttttcttctgtttgacgggttttgccttcacttttcgcttagttgattgcgccatcaattgttgattggttgatagaaaacgttgttgccgactatgctgccaaaacacaccaccaccaagtaaaattatcaccaaacaaggtacccaccagaatcgacgataccgttgccaatagtcgcgccacatttttcgccacctccttattcctaattaccccaaaacgcaaaaaaaatttgccgattctttcgaaccgacaaattttttaatgtttggctaaataatccaatgcatcgtccaagtttttgacaggaacgattttcatcttagtaccaatttttttagcggctgctttggcaatcgcataattattttgataatggggttctacctttagtatggcttttgtcacgggatcatcaggtgcgaaaaagactttggcgccttcttgactcgcaatcagtaccttcttatcaattccgccgattggtcccactgtcccatcaggatccattgtccccgttccggaaatcttgcgaccacccgttaagttttgtttcgttaattggttataaatctgtaacgtaaacatcaagccagcagaaggaccaccaatttcacccgcatcaatcttaaccggcacttttgtcacaatttttgagtgatctgtcagcgtaattcccaaaccagcgtagcgcgatttaggtaatttaatcaatttacgggtcgcagtcttacgctggccattatgttcatagctaatcgtgactttttgattcactttaagcccttgaacatacttgacgaacttatttgcactcttaaattgatgctgatcaattgccgtaattgtgtcaccaatagccagatcttttttaaaagctgaattatctaaaattgacatcacatagacacccagatattgagtgtggtattcctgatgtgccttttgataagccgcctcaatcgcaaaattaatcgagctttccatgtagtatttttgaatctgatcatacgcttcagtatcatcgtcacccattagttcatcacgactaataatctccgtaaaaggttgtgttttagacagtaatagctgtaaccccgtcactggtccttgaatcccgacggttgttaacataaagtggcccttatgctgatctcgttgaccgttaactttaacaaactggttggtattttcggccgaaccgaccccttcgacgtaataatgcgttgggataaagcaaaaagcaaacacgacgatcaagccaacaatccataggagatgcttcaatagacgtttattcttattcatattaatcactttcaggtcctaatttttgtgcaagcgcagacgcgacaaccggcggcaccaattgttcaacctggccaccaaacgttgcaatttccttcaccatacttgatgagataaaagcaaattcttgctttgctaataataacaccgtttctaaatcagcatcttgtgtctgattcaacgccgcaatatcacgttcatactcaaaatcattggcattccgaataccacgaatcaaatatcgcgcaccgacttctttagcaaaggttgccgtcaacgtcttcgattgtgcgattaccttaacgttatccaagtgttgcgtcgccgcttcaatcagttcaaccttagtggttgcgtcaaataacggttgtttagtagcgttagtcatcaccgcgataatcacttggtcaaacaagtgacttgcccgttcaacagtatcgagatgcccatttgtaaacgggtcaaaacttcccggaaataatgcaattttcggcatatagctgcctcctaaccaataaatttaaagattgctacttctgtaatcccataattctgttgccgtttcagtatgtaatgcagaatgtcagttggataatcaaccgtcgtatcggtttcgcaaagaatcgtcgcgtctggtgctaataaccccatttcgacgaattgttgtaactgaagcaacatctgttgttccttgtagggtggatctaataaaattaaatcgaattgaacaccagcatccgctagtttcaccaacgctttttcagctggcatcttccagattgtaaagcattctggcattttagtaaccgcaacgttttcttcaatcgtttgaatcgctgcatattggcgatcaactaaataagcatgatccataccgcgtgaaacggcttcaattgcgagaccaccgctaccggcatataaatcaagcgcctgcccaccgtcaaaaaattgccccaacatactaaacattgcttctttaaccttgtccgttgttggccgtgttttcatcccagggacagcttttaacttgcgacccccaaattctcctgcaataatccgcatctctattactcctctaattctgccgcatcggcaatttcttgatctgagcgtcctactcgattactgaaatccatatcaatagctggtctttcagaaggggtcactcgtttgacgtagtgtaatttttttaaccgttgcataacagtttcggcatctgccatatctacgtatagataaacatatttcattcgtttcgaggtgtaatacacaagtccgtaacggcgtaattgctttacttgtcgtaatgaatagagccagacgacaattccttggcgttgtgtgatttccaatgtcatttaatcagtccttttacatttagtcaaaaatcatcattgtttgttcatcggtacacagaagcgttaagtgctgatagcttggattattaatcgcaagttgcaacgctagattctgttgttgcgcaagcaccagcccttgggaattgagcccttgtggccaataaaaaagttgctcgcgctgcggaaaacccgctgctcttaacggagcctgtttaaagtcggttgctgttaaaaaggcgtccgtctcttgtgtcgcttgtttgcgcacttggtgcagcttttgcagtccctttttagtcaaccactgcgttggtgtacttgttaattcactcaccaaattctgtgtattttgcaatggtagttgatttatcgtgagcgcaggttggtcattattttggcgtaatgtctgcaacgtttgcaccaaagcgagttgtcgttgactatctgtttgcggttgttgcgactttgctagctcatccactgggactggtgtttttgaaacaactcgatataaatcagtttgtagcagtcggttcgcatttaaatacatcacagctgtcaatcgttcttgctgcatcactaaagttgcaaacgtctggtttttaaacatcactaacggcgtttgttggtgttgctccggcgttaaccgcaacttaaattgttgctcgtgtaacgtcactaagagcgaagttggtaacgccgtcttcttagttaatgtagcccgcttttgaaaaaaatgaaacggcgccacatcgttgtccgcaccaacaaccatgatttgttgtgtttgattggattggttatcaatcagcgcttcgacatactgtcggctatctaagtgaaataaccaccgtcgttgattttcatcagtcagctgttgctcgaccggttgcccataggttgcaattaattgttcagctggttgattaatcagtttcgccggcccttgtgttttcgtcagtggcgtttgttttattgaccgttcagtcgacggggcttgtgcaaccttaggctgattaaccgctggtgtttggataatcggccaaccataaaggatgaccaaccagacaatcaatgcaacgattaatcggcgtgccccttttatcatgctttcacctcactaattcgctgccgcagcttttttctcttgtgcgctgatgttcaacacgattcccagtgcaatcgctagaaccatcatacttgatcccccataactgatgaacggtaacgtcaccccagtaatcggtaagattcctagcaacccaccaacattgaatagggtttgcacgaaaatgatagtgccaattccgtaacataataaagtgtgatacatcttagtcgcatgaatccctaggtaaaaaatccgtgctagtagcgcaaatagtaacgcgataatcacgagggtcccaatcacacctaattcttcagtggtaatcgataaaataaaatcggtatacggttctggtaagtaaccgcgcttttggatactattgccaagccccaagccaaaccaaccaccattattaatcgcatagtaggaattcactaactgactcccacccatattttccaattcaaatggatgtaaaaacgataaaatccggttgaacttataagaattaacgttcgttgaaaagttaaagtgccgtaaaatactaaataaaatcataaccgttgttgtgaccgctgtaatcagcgaaaaaccataccaatatgacataccggtgccaaaaaacatgactaccatcacagcagccaagatactagcgccccctaaatcaggttgaataaacaccagtaggatgattccagcgactaatacaaccggactaaagaataattttaaattatcaacaaatccgtcggccagttcattttccttacgcgagagcatattagcaaggtaaataacaatcaataacttcgtaaattctgacggttgaatggtcagtggtcccaattgaatccacgcggtagccccattaatcgctgcgcttggtctgaaacgacttaacagcaataaataaatgagcgccaagaaaaccacaatcgtcattgcttttagaaaagtgcgattttttaaaacggataacttaagaaaatatgtgatcatcatcaagataaagcctaatgcgataaacactaattgcttggtaaaatacgcatctggtttcattccgcgaattgacattaaatccgaactcgccgaatagaccattaaagcaccaaatgcacataagataacatatggtagcaataaccaatagtctaaatactgaattttacttttttgaaactttttccacacagttacacctaatttctatttcgttcgtattcagcctgtccttgcccaacttgcatgccaatttgattgacccgttcttctaactcacgcatcaaagttgcaccctgtggcgcactaataagttgcatccgttttgcaaaatcaacctcgcgcgagaaaccaaataattgggtatcaattacctcttcaataattggacattgactcatacaaagcgcatcaatttgagcacgcaatagttgctcaatgcgtagcgcatccgcttctaaagtgagataagctgttgttttttgttcaatcataatttacgcctacctattcgttattaaaaagcatactctgttcgttattataccatatttatgcacaaaaaaaggtagccaagcggctacctctaatggtttttaatgattaaccttttttacgtttcttatcagctttttgacgcatacttgtgtcaagaatcttcttacgtaaacgaacagaagtaggtgttacttcacagtattcgtcatcgtttaagaattcaattgattcttcaagtgacatttctttaggtgtcttgatggcagctgagtgatctttaccagaagcacgtgtattcgttaagtttttacccttagtaacgtttacggcgatatctgtatcacggctgttttgaccaacaatcatgccttcataaacatcaacgccagcgccgatgaataattggccacgatcttcaactgattgtaaactataagttgttgatgaacccgcattgattgaaactaatgcaccgttacgacggcctggttcccagttcttaatcactggcatgtatttttcgaaggtatggttcataattccgtatccaccagtcatcgttaagaattctgttgaataaccgattaaaccacgtgaaggtgctaagaaagtcatccgtgtttggttattagcatcactttccatgttttgcatttcacccttacgttgggccattgagtcgattactgagcctgtatattggtcaggtgtgtcgatttgaaccatttcgaaaggttcgcatgtaacgccatcaatatcgcgatagataacttctggacgtgacaattgtaattcgaaaccttcacgacgcatttcttcaactaagattgaaagatgcaattccccacgacctgaaacaatccaagcgccggctttgtcggtatcttcaacacgaagtgaaacgtcagtgtgtaattggtgacgtaaacgttcttcgatcttacgaccagtaacgaaatcaccttcacggccaacaaatggtgaatcattagcagcaaatgtcatttgtaaggttggttcatcaatccgtaagattggtaaagcctcttgatggtcaactggtgtaacagtttccccaacatagatatcttccatcccagaaacagcgattaaatcgcccgctttggcttcttggatttcaacacggtctaaaccgatgaaaccaaaaatcttagttacgcggaagttcttagcagaaccgtcaagtttaagaacagaaacttgatcaccgatcttgattgtcccacgagaaacgcggccaatcccaatacggccaacatagtcgttataatctaacattgccacttggaattgaagtggttcgtcactattatcaactggtgctgggattgtatctaagattgtgtcaaagatagggttcattgtatgggcttgtgtatctaaatctgattcaagacttgatgtcccgttgatggcacttgcatacacaactgggaattcaagttgatcttcatcagcaccaagttcgatgaataattcaagcacttcatcaacgacttcttcaggacgagcgcctgggcggtcaattttgttaatcacaacgattggtgttaaatgttgatctaaagccttcttcaaaacaaaacgtgtttgtggcattgtgccttcaaaagcatcaacgactaataacacaccatcaaccatcttcatgatccgttccacttcaccaccgaaatcggcatgtcctggtgtatctaagatgttgatttgtttgccgttatatttaacagcagtattctttgaaagaattgtgatcccacgttctttttcgatatcatttgtatccattgcacggtcagaaatttctgcgtgaccatccaatgtatctgattgttttaacatttcgttaactaaagttgttttaccgtggtcaacgtgggcgataattgcgatattgcgaatgtcttctctttttttcaagtgtttcagcttcctctcgctagtgacttgactagtgttgtttgtctcatgtatacaagctattattttaccataaaaaaatgggctgtgcttcatatattagcgtttttttgaaaatacgcaagtttttttcatgaaaatttaattatctttaatcatttgaaccattcataatcgtgacaatttcttgtattgcttgctttggcgcgataatcatcccttcttttcgcatcatggaaattggttgaccatcaaattgtaaaacttgaaaacctaacgtctcagctaaaacccgacctgcagcaatgtcccatggcgctaatttggagatgtaagcttgcacttgccccttcaacaaatgggcgaaagtgataccggcgctaccgtaaatccgcacacccgaacattgatacaacacctcttgcaagtgtgcttcattggtgaccagcatccgtgtattgacacagattaacccttcttgcaacggctcgtcgacagcatttttgagggcagcttcgttttcgaatattcccaactgtggaccgccccagaacaattgatcggccatcacatcataaataatcccgaatagcggctgaccgtcttcataaacgccgatcataatggcgaaatttgcccgttgcttcacgaaattcatcgtgccatcaatgggatcaataaaaaaagttagtccctgttgccaatcatcaggcacctcaccggcaccttcttcccccactaattgcgcgttcggataagccgtcttaatcttttcagctaagaaagcttgattagcacaatcgacattagtcactaaatcattaggcccagacttagtactaaccgttaatggttgtttaatttgtgtgcgggtataggcagctgcttcaaggatccacttttgcagcgaacgacttaaccgatacagtgcttcttgttccattttttcatccactttcactaattaagcgtcattttgatttgggttcgactactcttctttgtagcctgcatacaccgatatattgaatagcctgacgcttctgaaaaggccttatcaatttgtttttcttgcatcttactttgaacaaccactttgaagtcacgataagcagcttgtaaatccgcaactttcgcaccaaattcataagcttgttcaacaagattatataatttcatgacttggacaacttcagttggcgtccagtctggttctaaaggataactatagttcgtttgcataaaggctcctaaaatttgcataaatttgcgccagtttcaattcaactgatgccattaatctctcatattataacgcacttttttagaagctgtcgaatccttttagaaatagcggaatcaaaaaacgacgcactcaactggtgcgtcgtcattctaaactatttattaaatatgaattggcaatcctaatgctaattcggcatcatccataatcgcttcacttaacgttggatgtggatgaatggttagagcaaggtcttctgcattcatgcctgattcaacggctaacgtcaattcagaaattaaatcactcgcgccaacgccagcaacttgagcgcccagaactgtgttgtcatccgtattcgtcactaaccgcacgaaaccttctgtatctgctaatgataaagcacggccattagctgcaaatgggaacttaaatcctttagcgttcattccttttgccttggcttctgcaaccgttaaaccggtcgttgccaattcaggatcggtataacaaacagctggcattgcgtggtaatcaaccgttactttcttaccggcaatggcttctgcagccactttagcttcataacttgctttatgcgccaaagctgctccagcaacgatatcgccaatcgcatagatgcccttaacgttagtttggccttgttgatcaacttcaatcaaaccacgatcagccatcttaataccggcttgttcgagtcccatttcgtcggtatttggccgccgaccaacagtcaccatcacgtaatcggcaacaagttgttcttctttgccgccgacttcatatttaaccgtcacattttgatcagtttcaacagcttcttttgccattgcgccagtaatcacatcgacccctttagccttgaagttctttgtcaccaattgcaccatatctttttcgaagttaggtaaaatcgagtctgtcccttcgagaatcgtcacatgtgcacctaagttggcataggcccctgctaattcagagccgatatagccaccaccaatgaccactaattcttttggtacttccgttaagcttaaaccaccagttgaatcaataacccgtttattaaatttgaagcctttaatttcaattggacgactaccagtagcaatgattaaatttttaaaactgtacgtttgtgcactctcttctttaatcacgcgtaagctatgttcgtccactaaaaaggctgaaccgtctaacacatcaatcttgtgttttttgaacaacattgaaatgccaccagttagtttttcaacaacctcatgttgtttccagtcttgcgttttcgcaaaatccaatgttgctccagtagtcgtcacaccaaagacagatgaatctttcgcctcttgtagtcgatgaccagctgaaatcaaagccttggaaggaatacagccgacgtttaaacaaacaccgccaattgtttcacgttcaatcacagttactttttgacccatttcggccgcgcgaattgccgcaacatagcccccaggacctgaaccgatgactactgtgtctaattcaattgcaaaatcacctacaaccattttaaaatcatccttccatcaataatagctctggatcagctaataattcttttaattcgttcatcgcacgttgcgcagttccaccatcaattaaacgatgatcaaatgatagtgataatttcaagactttgccaacagccaactcaccatcagcgttgacgattggttctgtcccaattcggccaacccctaagattgcaacttcagggtagttaacaaccggtgtaaaccaaccgccaccaattgatccgatattactgattgtcattgaaccaccactcatttcagctggtttcaatttgttatccaatgctttttgcgtattttcgccaatttctttagcgatggcaaaaatactcttgctgtcggcatccttgatatttgggacatagagcccgtgatcagtatccgttgcaattccgacattaatgtagtgtttataaacaatttcgttagttgcatcatcaattgacgcgttcaaagttgggaagtcacgtaagaccgttaccaaagctttaacgatgtatggtaagaaggttaacttaatgtccttcttagccgctacatccttgaatttcttacgatgggtcatcaatttagaaacttccacttcatcgaataaagtaacgtgtggtgccgtatgcttgcttgtcaccattgctttagcaattgctttccgcgttggtgacattttttcacgtgtttcccgttctggtgtaacagaggtgtatggtgtcgcagcaactggttgtgcaactggtgttgctggcgacgttggttgttctgctgtctctacagcaggtgctgtcgttgttgcagcgccattttgcatgaagatttgcacgtcttctttagtaatccgaccatgtttaccggtggctggcacttgactgatatcaacatcgttttcacgtgcgaattttcgaacagatggcatagctaaaatcgtccgattttggtcactaatcgcaactactgcttgactgcttggcgccgttgttttagctggtgttgattctgacgccgtagctggtgcttgttcagcagatgttgccgttgccgaattgtgacctggagcatcaatttcgaccaatacttgaccgacagtcgccacttcgccttcaccgactaaaattttaacgactttcccactaacaggtgatgggatttcttcaactgatttatcattttgaacttctaataaagtgtcatcttcttgaatggtatcgccttctgcgaccgcccatttttgaatttcaccttcggcaatcccttcaccaatatctggtaatttaaattggtaaacaccacctgcatcggttgcagtcggtgctgcttcgggtgtagcagctggtgttgccgtacttggtgtatcgttaccttcaacacctggtgcgtcaatttcaaccagtacttggccaactgttgccacttcaccctcaccgactaaaattttaacgactttcccactaacgggtgatgggatttcttcaactgatttatcattttgaacttcaagtaagacatcatcttcttgaatcgtgtcaccttctgcgactgcccatttttgaatttcgccttctgcgatcccttcaccaatatccggtaatttaaattgatatgccatacgtctaacgtcccttctttcgttatcgactaaaagttaataacttctttaaccttattttcaatatcagttgcatttggtaaccaagttgcttcagcttgtccaaatgggaatggcgtatcaggagctgaaacacgtgcaattggagcttccaatgaaagaacagcacgttctgaaatttcagaagcaacttgtgccccaacgcctgcttgtttttgtgcttcttgaacaataacgacccgccctgttttttcgacagaggcgataattgttgcaacatctaatggtgcaattgttcgtaaatcaattacttcagctttaatattctctttagctaggttttcggccgctttaatcgcttctctcaccattgcaccgtaagtgatgattgaaacatctgtcccttcagtaaccacagctgctttatcaagcggcactgtataagattcatcaggtacttcttcgcggaacgaccggtataatttcatgtgttcaagatacaaaacaggatcgtttgaacgaatcgcagaaatcaataagcctttggcatcatatggattacttggcacaaccacgcgaatccctggaatttgcgtgatcattccttcaaagttatctgaatgtaattctggggtatgcacgccaccaccaaatggtgcacgaatcgtgattggcatgttgcgtgtgccacccatccgataacgtgtccgtgacatctggccagcaatcgaatccattgtttcgaaaacgaaaccaaagaattgaatttcaggtacagggcggaagccttctagtgctaaaccgattgataaaccaccaatcccagattcagctaacggtgtatcaaaaacgcggtcttcaccatgtttagcttgcaacccttcagttgctcggaaaaccccaccgttcttcccaacatcttccccgaaaatcaagacgttcttatcatctgcaagttctaaatccagcgcatttgtaattgcttgaatcatcgttttttgtgccatcttaattcgactcctttgcactgtactctgcgatttgttctttaatgttttgtggttggtcttcaaatgtaacattcaagaaatctgtgactttttgttttggcgcagcatccgcttcgttgatggctgctttaatgtctgttttaacttgttcgatcaattggtcttcttgatcttgtgaccaaagtcccttatcagttaagaaacgacgcattctaacgagtggatcacgtttcaaccaaatatcgtctgtttctttggtccgataacgagtcggatcatcccctgataatgtatgtggtccataacgataggttaatgtttcaattaagaccggtccgttgccagcagttgtaaattcacgcgcttctttcatcacttcataaactgctagtggatccatcccatcgacttgaatggcaggaatcccagctgcgacccctttttgagccaacgttacagcagctgtttgtttttcacgtgggaccgaaatcgcaaagccgttattttgaacaacgaaaatggctggtgctttaaaagcacccgcaaagttcaagccttcatagaaatccccctgtgaagtcccaccgtcaccggtataaacgtaaacagcattttctgattggcgcttcttcatcccaaccgcaacacccattgcttgaatgtattgcgcgccgataatgatttgtggtggcatcgccttcaaagattctggatacttgttaccgtcaatatggcctcgtgaccataggaatgcttgtgataaaggtagcccatgttgcactaattgtggcacatcccggtaaccagggaataaaaagtcgtctttagtcatcgcaaagttacttgctaattggctggcttcttgcccagcagttggtgcataaaatcctaaccggccttgacggttcaaagcagttgctcgttgatcaagcacacgcgaccaaaccatttgtttcatcagttcaaccaattggtcatcactgagatccggcatcaattccggattaacaacctggccagtctcatctaaaatttgaacggtcttaaaatcttggctctcatcgctcaataacttttcaaaattaactgcagctttattattgaccatagtatccatatctcctctttaaaaaactgttttaatgactgcttatatctgtattacttaagcatctttacaagactaatttagcatttcacatcactaaatgcaagcgttttataagctatattagtcagtttacgctttcattagtttttattacatgtgaatctaatcactagttagctaattttcacgtctgttctatatctgttataatttaatttcgttttctgttatataatagcaaataataggcacaaaaaaagagtccgccgtagcagactcatcgttaaatttaagttggggtagttctatgccaagaccggttggggtatctcagcgttgccagcatgcactaagagctcttgaaacactctgactactggtttaatttgttgactgacttgcacgcaccgttcacttacccgcaaatcatttaaatcaatcgcaaccttaatttgaccaaggttgactaacttaatcattgtcagcaggattgccccgacaaccaacgttgccaagcccatgaaagcgaattgattaaccattaatactgcacaaaacgaaaccaatgcagctaccgccatcataaaagtgcttcccactctaactttaggtgtttgtgctttagcaccaatcgttgcatctagcacaacgccgtgcaccatttcagtcactgcttcgcccgcttcaataacgttaacatctttgttaactgttgcgattgtaacgggtgtcttttcgctagcagccaatactaaaatatcaccgggcacaatttgatctgcaccgattaagcgtaaaaaaccatcacgcataacgctaacccgtgcttgtgaattttctaatactgcttctcttttagcagcttcgacagttgttaagccacttggccgagttgccaataaacgcattaacatcccactgcttgtaatgccagtgatgttaacgtctttttttaatttcttgtgcatcgcgttcgacactccttcccttttgaggaagtcgtcgtaaaccgctagcctaatgctggcagtaaaatgacagaccacctcgaatgatcaccatcgctactacttacaggtccttcagctgttttcatcattttactcaccagactttctctactttaaatttagtcataccgctttatccgacaaaaaaagacgcacaacaattgagcgtcatccatttatcatggcgttcccaatcgttcagttttagcactatatgacgtagaaaccatgttcagctacgttagaaaaagccttcattggcagtttcagttgactcaattggcatctctcgatgtttctgagtagcagcgtttgttcatataggagcctcacctaacggaaaagcaatatatctatactcttatactacccgtttcactttagcaggtcaagcaattcattccgttttaacttgaattgtgctagaataatgaatgacgaattaatcggaggtcttaactgtgatattaatgaaagatattatccgcgagggtaacccaacacttagaaaaatagctgaacctgttacttttccgctatcagatgaagatcggcaacttgccgctgacatgatggcatttttagaaaatagccaggatcctgaacttgctgaaaagtaccacttgcgcgctggcgtcggtttagctgcaccccaagtagatgtttcaaaacaaatgtctgctgtcttggtccctggaccagacgaacccatcttcaaagatgtgattatcaaccctaaaattatcagccactctgttcaaaacgcagcacttgctgaaggtgaaggttgcttatcagttgaccgcgaagtgcccggctttgtgccccgccctgaccgtattacactacgttaccaagatttagacggtgaaagccacaagattcgcttaaaaaactacccagctattgtgtgccaacacgaaatcgatcatctaaatggcatcttgttcttcgatcacatcaacaagcaagacccattcgcagcaccagatgacatgattattattgaatagaagtgcgattggttgtgcttagcaactgagcattaatacagaattggcagttatcccgaattgtgggataactgccaattttagattaaacgggagttgttgcacccaagcgcacgttaaagaagaagtgctgattcgagttggtcaggctttgaggcttaacggtaaaggctactcgagaagcacataaaaaagcgtgattgaaatctcattagaagatttcgatcatgctttttttatgcttccgccgcttcaggcgtatcggcaaattgactgttatataaattagcgtacacaccgccggcagctaatagcgaatcgtgcgtcccttgttcaacaatttgaccatggtccatcactaaaatcaaatccgcgtcgcgaatcgttgagagtcgatgggcaatgacgaaactcgttcgcccttgcatgactttttccatggctttttgcaataaaccttctaatcgggtatccaccgaactagttgcttcgtccaagattaaaatcttaggatccgcaatcacggctcgggcaatcgtcaatagttgtttttgcccaagcgaaacgttgcttgcttcttcatcaatcgtcatttgatagccgtttggcaacgtatggataaaatgatcgacattagcggttttagccgcatcaacgacttcatactctgtcgcatcgagtttcccgaaacgaatattatcggtgattgaagcatgatataaccaagcatcttgaagtaccatcccaaattgggaacggacttgttgcttgcttaattgcttcgtgtcaaccccatcaatccgaatcgttccagatgtcacatcataaaaacgcatcaacaagttaatcatcgttgtcttcccagcaccggttggcccgacaatcgccactttatcacctgggttagcagtaaagctcaaatggcgaatcaatggtttgtctgggttatagctgaaactgacatcatcaaattcaactttaccttgaacgattgctggcaacgatgctgtttcattatcggttgcttcaactggctcatctaagatttcaaatacacgaccagttgcagcagcagctgattgaatcacaccagacaactgtgtaatctgtgagattggttggttcacttgccaaatatattgaatgaaggcttgtaaattaccaactgaaatcacaccgtgcaagacataataaccacctaacgttgccatcccggcatacgtcatgtttgtcgttaaaccaactaacggcatcatcaagccagaaacaaaggctgccttaaagccatagtcagttaaccgatccgtaatttctgcaaaagcagcaattgcgcgttcttcttgtccgtaaagtttcaagacactgaagccgccataattttcctgtacaaagccgttcatttcgcccaacgtgtcttgttgtcctctaaagtacggctgcgatttctgaatgacccgtcttgaaatcaataacgatgctggaatcattattaatgataagagcgccatccaaatattaatcgtaatcatcatgatcacggccgtgatgatccctaagatcgatgtcacaacttgaattaaactctgttgtaaagcgttcgtaatcgcgtccacatcgttggttacccgtgacaagatattcccttgttgttgtgaatcaaaaaaacgaacgggtagcgcattgatttgcaaatcaatgtcgcgccgtaaatcacgcatcgcccgttgaacagcccgcgtcatccaaaacgagcctaaaaacatcgtcacttgatatagcaacgcaaagctcaaaatcatcgcaatcaccttcgcgatataactaaaattaatcgcaacgtgttgtgctaaattccgactgatttcagtaatggctagtcccatgatcactggccacagtgcattagcgagcaccgaaataacagttgcggtaatcgcaagccaaaatgtcacttgatacggcccaatgtagcgcattagccgtttaagttctctaatattcttcattgagttcctcctgtgataactgtgatgccgcaatcgcacgataaatctcgttatcttttaataagtcgcggtgagtcccaataccaaccacttgaccttcgtttaagacgacaatccgatcagcattcatgatagtcccaactcgttgtgccacaatcagcactgttgcctctttggtgattgacttcaatgcacctcgtaacgccgcatccgttttataatccaatgctgaaaaactatcatcaaagatataaagcgcggggcggcggacaatcgctctggcaatcgccaaacgttgcttttgaccaccagataaattgctcccaccttcggctaaataagtttgtaagccgtctggtttttcagcgacaaaggtatctgattgtgcaattttcaaagctgtccataattcttcatcagtcgcattcggattaccataacgcaagttttccgcgattgttccggtaaataacaccgctttttgtggaataaaaccgatcttttggcgcaacgccttaagttgatagtcgcgcacatcatgaccgtcaagcttaatcgatccacgtgttacgtcaaaaaagcgtggaatcaattgaatcaacgttgacttaccactcccggtactcccaataaaggcaaccgtttcacccggatgcgcttggaacgtcacatcccgaacgaccggactttcagtcggacctggataagcaaaggagacattatcaaacaccaattcaccttgtgtgtcggttgttgttaccccgtcttctttttcggtaatattaattggcgcattcagaattttttcaattcgttctgctgaaacagcggcccgtggatacatcatgaagacactggcaaataacataaatgaaaacagtacgtggaaaatatattcaataaacgcaatcaacgtcccaaccgctaagtgaccaccatcaatctgaacagccccttgccaaatgattagaacgaatacgatattaaagatgaacgaaaagcccggttgtgctaaagccaccaacgtaaacagccggatagaactatgactgtagtcatcattcacttttctaaagcgtaatttctggaattgttcccgcacaaaagcacggacaacacgaatcccagtcaagttctcacgcagattcagattaatcgcatccagatttttttgttgttccgtcgacatcggttcagaaacgcgaccaatcaagacaacccccgttagcaggattggaattgccgcaaatacaatccatgagagcgattgacttgtccgtacaatcatgaaagcactcgcgacgatcatcatcggggtcataaaccctgtccgcaacacttgggtcataaattgcatcacctggaaagcatcattagtggtccgagtaatcaaagaagacacaccaaattcgccatactcactatgggaaaactgcatggtttgtttaaaaatatcgttacgaatgtcacggacgatattggtggttaatttgctaccagtataagccaagccaattaagccaattagtccgattaaacagattccaaccatcaataacccaaattgccacacaggaccaaaggtatgttgattaattcctttatcaataatttgtcctaataacgttggtaatcccaattcgattagaataaatccaaatacacaaataaagttccaaaatagtaatttcttatatcggatcgtatagcgccacattaatttcatcggtgcaaactccttctaaacttcaaatttaatcttctacctgtgccatatctttaacatactcgattgtttcgcgattgacaataaaagcaacgtcaaaatgcaattgtttttccaaaaaccacacatcagtgactagcaaagccggataacgcggactgacggaggcaatccgccgttcgtaagccacttcattgagttgttcctcaattgcggctgccacatcctttaatgcagatgatgtttgtcggatgggcacttggtattcgaagaccatcacattattgccccaaatttcagtgggcaggttcgaaaccagtttggcttgcggtgcataaaaatccggctgactcgcttgcattttttgataagccaccgttgcaatttcatccgcaatttcttgactactgtgttgtaaaatccgcgtcgctctttgtcggcgtaaccgtttaatcaaccaggttaaaaaaagcgctaacgcgacaatgataacgactgacaaccaaattaacataacaatcccccacttctattgctcactaatatgataattataaccgaatcgaggcaaacacgctatttagagcacgtcgctcaatgtatactttaccgaaaagatatgctaaaatattcttaaatgttgagtaatcaacccctggacggttaatctttcgtttaaaactatgatgaataataaaggagttttacaattgatttataaagtacttttccaagcagacaaaacccaaagccctctacgcgaggcaactaaatcgatctatttagaagcagacagtgccgttgaagcacgccaacttgttgaagacaatactccctacaatattgaatttgtacaagaattatctggtaagcaccttgcttttgaacaagaatcagaagattttaaattaacggagttttaattaaatgaaactcgatattaagaataacgaaaccgccgttttcgccgtagggggacttggtgaaatcggtaaaaatatgtatggtgttcaattccaagacgaaattattgtgattgatgccggcattaaattccccgaagatgaactcttagggatcgattatgttatttcagactatcaataccttcaaaaaaatcaacaaaagatcaaagccctcgtcattacccatgggcatgaagatcacattggtggtttaccttacttcttgcaacaagtccctaatgtacccgtctacgctggtccattggcacttgccttgattcgcggtaagttagaagaacacggccttttgcggtcaacagaattacacgaactaaacgaagataccgtccttaaattccgcaaaacaagtgttgatttcttccggactacccattcaattcctgatactttaggggttgcgattcatacacctcaaggggtaatcgttgaaactggggatttcaagtttgacttgaccccggttggtaatcaaccttcccctaatcttcaaaaaatggcacgtttaggtgaagaaggcgttttatgtttaatgtctgatagtaccaatgccgaagtaccaaactttacaaagtcagaacgtttcgtcggcacttcaatccgccatattgtggaacgcattgaaggtcgcattattttcgcaacgtttgcttctaatatttcacgggtctcacaagccactgatgctgcgattgctaacggtcgtaaaattgccgtctttggtcgcagtatggaagcagcggttgtcaacggtcgtgaactcggttatttaaatattcccgatgaagctttagttgatgccaatgaattaaattcgttgcccgccgacaaagtgatgattctatgtacaggatctcaaggtgaaccaatggctgctctaagccggatcgccaatgggactcaccgtcaaatttcaattcaacctggcgacaccgttgttttctcaagtaatccaattcctgggaatacaatgagcgttaaccacgtgattaataagctttcagaagctggtgctgaagttattcacggtaaagtgaataacattcatacgtcaggtcacggtggtcaagaagaacaaaaattaatgctccggttaatcaaaccgaagtacttcatgccttgccatggtgaataccggatgcaaaaaatccatacggaactcgctcaacaatgtggtgtggaacctgataactgcttcatccttgaaaacggtgacgtcttagcactcacttctgactcagcacgggttgctggtcactttagcgccgaagacgtttacgttgatggcaacggaattggcgatattggcaatgtcgtgctccgcgatcgtaaaatgctctcagaagaaggtttggttgttgttgtggcaactatcaatcttggtgaaaagaacattctcgctggtccagatatcctctcccgtggtttcgtctacatgcgtgaatcaggtgaattgattagcgaagcccaacgccgagttttccgaatgatcgtcaatacgtttaacgctaacgacaaggtcactgaaaaccaagtccgcgaagcaatcattgatggcttacaagacttcttgtttgaaaaaacagaacgccgcccaatgattttaccaatgatcattcaaagtacagaataataagttttgcgccaggtcaatatatgacctggcgctttttttattgtttaatgcaagtttttattgtcaacatttggtaaaaaccgctataatatacaacagattactttttctgaaaggcggcttgttcatgccctccaatccccatttttacatcattttaaaccaagttgccggtaccggtcaggcagcgagtatctggcctaaaattgaaactcaattaaaacaaaaacaaattcactatgaccttcaactctcccactacgcaggtcacacgacccaattggccttccaatttgcaaagtttaagtacacggatcaaattttattaattattggtggagacggcacgctcaatcaagccatcaatggtctccagaatgctcagcgcggcgatattccgattgcttacattccttgtggatcgggtaatgacttcgcccgtggtgtcgggattagtcgtgatccattgaccgcactcgaacaaatcttgtcggccacaatgccaactgccatcgatttaggttattatcatgacacaacgaagaacgaccatggctacttcgttaacaatgtggggattggttttgatgccaacgtggtcagcaccaccaatcattcaaatcataaacgacttttaaatcgattgcacttaggctcattagcttacatcagctcattggttaaagtttttatgcaccaagatgcgtttgaagtcaccgtcacggctgatcaccaaaatcattattttaaacgtggctttttagtgaccaccactaaccatccctactttggcggaggggtccccatcatgcctagcgcaacggtcgacaaccatcaacttgatttaattgtgattgaaaaattgaatccctttttcttttgctatctttttgtgatgatgctgtttggtcggcacacacgctatcaagcggtgcatcactttgaaggaaccaacttagcgattcaaacaaaaacattagaattcgggcaaatggacggtgaagaacttggtagccggacatttgatattcactatagtcttaaaagccaggcattttggctaaagaagcaagcataaataaataaaaggcgctgcctccaagttgggggcagcgccttttaacgtgctcttcaaatcatgttcctatgcctagcaacacaaggctagtgcacaaaagttgaccaaacttgaatgcactcatttctttagaagtaatccgagaagtatggttggtccattggaataatattctcgagattttttagtgcttgtcggttggcttgtagtctttcaatctttgccaagtatgatgggcgtcgatagctcatcagcattgttgttagtgtctggatgtcgcattgaattcgttcaccgactgggcgacttgtgacctgcacttttccttgttcatcccaataaacgccaaacgtaccgttattccattcagctaatggatcggtcaattcaatgtggaatgcttgcccgtccgtttcaaacggataagccaacaagaattcacgcacatcaacaatccgcgccataaaatatggcttaatcgtctggtcaatatcaccatcttctaataagaatgaaatcggttcatcctgatattgattacccttgacatgttcaatcattgaataatgcgcgccaatgaagttccacagaccaatccgggcttcttgattaagataaatcatttctttaatatggaagacttcgttggcaatccagtataaaacatagccggtgggttgttcattttcatcataataaacaccagcaatccgttcttcttcattttcccaacgccaatattcatcccagttcagttcgttacgaatcattgcaccgtgattttttagtgcaaaccgttgatacgttttaatcacgtcttcatcgtcaatatcaaggcgttcaacgtgcccatttaccggccgttgcttaggtaattggctatcacgaatatcataagttaggtgatcagacatgatctcccaccctttcttacgataaaacggaatgctgtatggatataaatacgatatccactgcttattctcacgcatcttgttcaagccgactttaaccaagtcatgcatcaaaccatgaccggcatattccgggtaagtcccgacaccagtcaaaccacccatgttaaatacctggccatgaatgttcacgcggcaatgatagatggctaattgtgaaatcagttcgtccccattaaaccatccgattacgtcagatttttctaatacgggacgtttggcgcgttctaattcgccctcttcgtagccactatcagaaacttcctgatcggtgacttgaaaaacataccgtaataagtcattaaattgttctaaatgttcaattgtcacgggtctaatctctaaattagatcgctggtcaaccattgtttcgcctcatttttcgttagttgtttaccctattatacactattttgatttcggcataaaatcgtacggtgtcaccccggtcatcccaatcattggatccacttgctgttgcgttagaacagtcggtgttaagacataactgattggcgtttcttgtattgcgtcgtcgtcttctggcactaagttcagttgttcatcaacagccgtttctggcgcacttggtggtgccggctggtcaacaattattttggcttctgtctgccccacactggccgtcttaatggcggtgctgagttgttcaccgttaaagacactttgaatccgttcttttaacgtcgtttgccgattggccgaaagttcctgagctgctttttggaaagcactcggttcaccaatcagaatcaacaatgatttagcccgcgtgactgctgtgtacagtaagtttcgcttgagcattcgttggtattgattgaccaatggtagaatcaccatttcaaattcagaaccttgcgccttatgaatcgacgtacagtaagccaatgtaatcttgtgccactcactccgcttataggtcacttctgcactatcaaaagcaatggtgatctcgtcaaccttgtccgcactctttttagcataggtaatccccgtaatctgcccgatttcaccattaaacacattttgttccggactattgaccagatggagtactttatcgccaatgcggtagtgaacgttaccaatgctaacttgttttttgcggtcatctagctttggattcatgatattttgaatcatcgggtttaactgatcaattccggctgctcctttgtacatcggcgctagcacttgaatgtccttagtttcaaaaccacgcgctttggccttagtaacgacttgttcaatcaccgattcaatttgatacggattacattgaatgaaactgcggtctttttgcggcttcaacaaatccgctggcagttggccttgattaatttcatgcgccaacggaataatcgttgactggtcatcttgccgataaatacgttgtaattcaaccgctggaataaccttactctgcaataaatcaaagaaaacttgccctgccccgacggatggtaattgatccttatccccaaccaatacaacctgcatatgactgggcaccgcccgtagtaatgagcgaaacaagtaagtatcgaccatcgacatttcatcaataatcaataggccgccttccaattctttgttaccggaaacatctggattattttcgcggccagtgattccgagtaagcgatgaattgtactagcaggcaaacccgttgtttcactcattcgttttgcggcccgacctgttggagcggccaataaaatcggaaacggcgtgtctttgtactcattaatatctaatgacagcccgtttaattcagcgtataatgtcacgattccgttaataatcgtcgttttcccagtaccaggtcctccggttaataagaacgcccggtgagtcatcgcaagcttaatcgcctcttgttgtacgtcatcgtatgtcatcttaaaccgtttttcgaggtggcgaatttcttgatctagatcatgtttaggatagctaagttgatcgcgttcattttcaattcgcattaaatggttcgcaatttgccactccgcattaaataacccattcggataaatccgattctcatcaccaacgactttcccatcatgtgcaagtgccatcagttgttcagccaccaagttcggatcaatagcaacattgcgtgctttttccatcaactcaatactagctgccaataacggcttggcctgggtataggtatccccagcttgattggtcaactcatttaacgcttgcattaaagccccttgcacccgcacggctgaatcagcggcaaacccgagggtctccgctaaattatctgcacgtttaaagccaatcccagcaatgtcagccacgagttggtacggattttcttggataatcttcagcgtatcttcatggtaggtctgatagatgttataggccatcgagctcccaaaaccatagttgtttaagccaataataatctgttccatcccattattaatcgtcagcgtttcaacgagttgtgcttgtttcttcgcatttagccccaatggttctaacgccgtcggatcctctaatattttatcaatcgcgtcaattccaagagtatccacgattttttcggccgttttctgcccaatgcctgtgaatttttcgccagacaaataagcgactaagccggccttagtcgttggttggtccacttggtaattatcggcttgaaactgtttgccatatttaggatgagtgaccactttgccatagaaggtatatcgttcatcttctttaatgtcgccaaaactcccggtcaccacaatttctgtttcgtgccagtcaatcgtcttatgtgctactttaacgagtagaattttaaaaaaattatccgggctctcatagaaaatactctggacggttccggtgactgttggtttggtttcgtctgtttttgctatatccacaatcgccatcccttattctttttgctctttagcctgcatgaagccttcaatatcaattaactgttgtttattctttttaaaataatccggtgcatagtgcttggcttgttcgaaataaggctcactatcagcgcctaagaccagttgcgtcaagccatacttaaataatacttcaccattttgaggtgcaatggtcaatgcctttttaaggtaggtctgcgcttggtcaaaatcacccaagctcgttaaaatatcgcccactaaaagattggcgtctagttggtctggttcttgttcttgaacggtcaacgcgaacgccaatgcccgtggattctgttcgagttgatgatatgtctgcgcaagcatatactgcgcatctgttgattgtgagtcttgcaccaactgcatgaacaagggcaccgcttgttgataagcttccgcttgataatagagtgttcctaatgcgtaagtcaatgcagcttcattatgaaattgcgtcaacgctttttgcaaaagtgcttcagcttgttcaaaatctttaagcgtcgttaaaaatgtcgcaagggtaacgtaagcttcaatgtcttctgagtgatcttgtaaatattgtacgagatctttaacagcggcttcgtggtcgccagcggcccattttgctagaattgcttgcacgtgatcatctcctatatcgtatctgttgcggataattgcttgctgaggaagtgtgtatcattccacttaattagtttgaaagatgctccttgatcgtcagttgtcatcgtggtcacagatgaatttgtcacaccgccgtctttgcggacctgagccaatggtgtcttgagtaaggactgcatcatcgccaccatcgctgccccatggctgacaataataatatgatcagtcggtttagcagccttcacaatcgcgtcaattgcttgcgttgtccgttcaatcacttgttcaaaggtttcccctttaatttcagttggatcatactccgctggtgcttcacgaaaggccttcacgattgtcggatattgtttttcgacttccgtaaagcgcatcccttccattagaccgagattaaattcgtggagtgcatcaacaaccgtaatcggaaaatcctgccctaagtctcgttttagcgccgcagacgttacctgtgtgcgttttaacggactcgtatataaatgatcaaaatgaatgggctttaaaaatgtggctaattcttcaatttcaacgtaactactgtctaataatggtgaatcaccacgtgcaccttgatagcggccttccaaattccattcagtcttaccgtggcggataaaatataaggttgtcatgcgttctctccttaaaataacttacttttcattatgaaagagttacgccctaaattcaagtcaatcgactaataaagcaagcatttttcctgtaaaacgccatcaaaaaaaccgctaggataaaaatactttttatcctagcggtttcatctattagttgctctaaacgtgtttcagtaggcatatttctgcggttaaccctatttgccaaatccagttaatcctcaaaatatgaacgcttacttacacactcttttatttactttctgcgacagcttgcattgcaattgcgttgacgtagttgactggttgatcgtagtttggttggaagaacatgtcaaccattgctaattgatcaatcgtcatcttcgtttgaatggccattgaaatgacgttcgctgcttgagcaatatcatacatacttgtgaatgaaccacccaatacttgacgcgtcttaggatcccacattaagttcatcaaaaccggtgtcgttgatggcatgaaatcagggcggtaatcttgttctaacgttgttgtagcgacttcaatcccacgcactttcgcgccttcaactgttaggccactccctgaataggtgcgaccaaataattcaacggcagaagttgcttgcgtgcccatgtacttttcagttggtgtttcgatgttgcggccgattaaaaggccttggcgaacagcgttggttgccaatggaatgtaatctgctttttgtgttggattgtaatgaacagctgctgaatcgccggctgcataaacatccttaacagacgtttgcatgtattcatccgtcaaaatcgcaccgttacctaacatatcaacttgccctttgaaaaggccagtatttgggcggaagccaacacataaaattgcaatgtcggctgtgtattcgttcttatcagttttaacagtgacttgatccgtccctgagaaactgaccactttttcgctaagcgcgagggttacaccgtggtcacggtaatcttgttccacgatttctgagatattaggatcgaaattcttgccgagtgcgtgtggtaatgcatcgattaatgtcacttgcttatcagttgttgcataggcttctgccaattcggcaccgatgtaacctgaaccaatcacgataacactcttcacatctggggcgctcttcttcaattcattggcatgcgcccagtttttgcagagcttaacgttcggattgtcaatgccttcaattggtggaatcacaggtgatgagcctgttgtgacgatgattttatcaaatttttcggttgtttcttcttccgttactaggttcttaacgcgtaatattttttgatctaagtcagcttctaaaacagtgtgttgcatcttcatgtgagcgcccgcttgcgctaacatttctggatttgaatagaacattttctgaggatcggctacatggccgcccacccaaagggcaatcccgcatgataagaatgataaattatcgtgtgtttcataaaccgttacatcccaatcaggatgttctgccaatgttgcttgtgttgcaaatgtccctgcgtgtgtacaaccaataactgctactttcatcatgttacctcctagaaatatccaaaaaacgacggttaatcgttgagaatttgtgaaatattacgcaaccagcatgtaactatattgtacgctacttagtttcggaaagtcaattgcctccagctattaaattaatttcacaatctaaaacgaataaccacttatgttttaaacgttatattgtgattttattctaaaaaaggtcgttgaccacttattgaacaaacccacaaaaaaagtgctgataaatataaattcatcagcacttttaacgattaaattagatatattgtaatactttcatgtcagcatcatcgttcgcagccttataagccacgtcaatcgtgccgccacctaaacattctgcgccgtcataaaagacaaccgcttgaccaggagtaatcgcacgcactggatcatcaaagacaaccgttgcagttgtgtcagatgtcatgtggacggttacgccgacgtcttgttgacggtaacggaacttagccgtcacgtggaaatctgtcccatgatcaactggtgtgatccaagaaatattacttgcatctaattgatcagcatagagtaattcattatggtagccttgaccaacatataaaatgtttttgtctaaatctttaccaacaacgaaccatggatcattggattcgccaccgccaccgattccaagaccggagcgttgaccaatcgtgtagtacattagaccgtcatgggtgcctttttcaagaccgtcgaccgtcatcatcttaccgggttgtgctggtaagtattcgcctaagaattgcttgaagttccgttcaccgatgaaacaaatcccggttgagtccttcttcttagcagttgctaagccagcctcttcagctaaccgacgcacttctgctttttgcatgtgaccgattgggaacattgatttttgtaattgatcttgagaaagagcgctcaagaaataagtttgatctttattgctatcaccgccacgcaacatgtgcgcgatgccgttatcatcgcgttcaatctgagcatagtggcccattgcgatgaagtcagcgtctaattccattgcgtaatctaagaaagccttgaatttcacttctttgttacacatgacgtctggattaggcgttctgccgtgtttgtattcgtctaagaaatattcgaacacgcggtcccaatattctttttcgaagttgacggaataataaggaatgccaattttagaagcaaccttggcaacatcctcataatcttccgttgcggtacagacaccattttcatctgtatcgtcccaatttttcatgaaaacaccaatcacatcgtatccttgttgctttaacaacaatgctgtgacagatgaatccaccccgccgctcataccaacgacgactcgtgtattactgtggtcaaccacaatatcaccatcatttcaaatagattctagttttctacgatttgaaggtcgtgaattccagtacttaacattatagcaatcttggttaatatttcaaactaaaacactcacttttcataagttaaacgtaaaaaaagcagtttacctatcaaactcctggtaaaccgctcttaaaacgttatttagccttctttaattaacacttcacgtgccactaagttagcaataataaaattaaattgttcgacgttttcagcattcttttcactcttgaaaatatcgactggatgtaagccatctggagaggtgacagacatcttcaacgtctgtaactctttaccaattgtcatcttcaacttaatcgcactgttaaatggtgaattaggatctaatggccgttccatctggaagttaccattgtttgtgggcacaaagccaacatctcttaatgtgtattttttaacggcgggattgagtcgatattgcaccgtactccccaaaaccgttgctgttgtttttaataaagccatctgcctaacctccatacactgaataagtctattttagcacaagcacgtaaacgctgcctaccccttagcggcttgctttgctaaattgcgtttcacaatcttcgtgagcgcttcggcaaaagcagcgacgtcttcgctcgatgtttcgtgaccaaaactaatccggatgctttcggcaacgcgcgggctatcctcaccatacatcgcgatcaacacgtgtgagggttccaaatcgccagcagtacatgccgaaccacctgaaattgcaaagcctgctaaatcaagattcatctgcaagacataggttgaaacacctttaatccagaggttcacaacatgcccgacttgatcagctccttctgcgttcagcgcaaaatcaatgtcgttggcttttaaatcagctagtaattgctgtttgaatccagcataccgtgcttgtaggtctgctttaaccgctggggccaataattcaactgctttcgcaaaaccagctacagcgggcacattttcagtccctgcgcggcgcttcttttcttgttcgccacctaggacaaatgatggtaaatgaatcgcgtcgttgacatagaggaagccgatttgcttaggtccattgatcttgtgggctgaaactgccagtaaatcgatattgtcagcttgcacatcgatatctaataagccatacgtttgcgtagcatctgtgtggaaccaggcgtttgagtcgcggacaagttcaccaatttcgtgaattggcatatgactgccgacttcgttattgcccatcataatcgatactagaatcgtttcgggcgttaaagccgccttcaaatctgcgagatcaatcaccccttgttcgttgacgggtaagtaaatcacatcaaacccttgcatttctaaataggccatcggttttaaaacggaatgatgttcaattgccgttgtaataatccgcttgccttctttagcacgcagtttggctgtctgaaggattgccgtgttattactttcggttgccccactcgttaagataagctcgttatctttcgcatgaatgctctgtgccaaagtatggcggctggtatccaacaccgtgtgggcttggcgcccaaaataatgggtgctcgatgcattcccgaaatcggcctgcatctgttcggtcatcgtcgcaatgacttctggggccatgggtgtcgttgccgcgttatctaaataaatatgtttcacaatttttcgcctcattttaaaaagtatctataatagtttaacatagttcgcttttaaagcacggataaacacttttcgctaccaaaaaaggctgggacaaagataccttgtcccagcctttaaaacacttaatctcagattaagcagtcattaaagctgctttttgatctgctgttaatgattcattcatccggccactcttgaaaccagctaaatcaaccgttacaaattcaaaaccagcttgttgtaatgcttggttgatttgttcgctgtgggttaagaagtcagcaatttgtgcttctgggacttcaacccgggcgattgattcgtggtaacgaacacgaaccgttgcaaaacctaaatcacgcaagaatttttcagattgcatcacttgagcaattttggcttcagttaaggctgtgttatatggaaagcgtgaagaaactgaacagctcgctactttattccagttatttaagtttaatgtctttgctaattgacggacatcaatcttataaaaaccagctgtttgaaggacactttctgcgccagcttcgtcacgggcccgtaaacctggacggaagtcgctgttatcatccatgatcatcccatctaaaacgtggtcaaagcctttttcagcagcaatttggttcaattgtgtatagaacatcttcttgctgtaataccatgtttctggtgtgttgttggcaatgtgttcgtcagataagtagttcaatgttgttgtttcgacattcgcgcccatatcatgtgccaagtcgatggctttgttaaattcttcgtctgtgaataattctgagttagcaacgactgctaagacgttttctttgccgagtgtttctaaagccatttttaaaactaatgtgctatcaatcccaccagaaaaggcaacaatcactttttccatttgttgtaaactgacagttaacattgcttttttttcagataatgtattcattgttaaagacttctttctatatcattagattaattgttttaaagctgttaattcattttgaatccgatcggcatacaccaaatcgttgttatctaaactcttgacgatcatcaagtttaaatgcgcggcactatcaacaaagtttttgaaagttgattgactagcggtttgttgcgcgtcatcaaggctaccataaagttgttctgctgttaaaagcgcttgttgcgcttcaattaaactggttgagattgtccccggttgtgaggcatgagcagcgacttcgaataagtcgaccatcatgttttgcgtttgtttaatttgttcacgcatggttgattcctccgattaaattagatgccaaagaaactccgcataaagagtgcggcacatagaccaccaacaaatggtgcaattccgggcacgataatcccgtattgccaatctgagttggctttatttttaattggtaaaagcgcgtgagcaattctaggacccatatcacgcgcaaggttcattgcgaatccggtaggaccgcccatccccatcccaattgcccaaacaagtaacccaactgcgattggtgcaatcccaggtgtcttgatttgtgtaatggcgataattgatgaaatgaaaacaaatgttgcgaaaaattcaacgaagaagttccgtggtaaattccggataccaggtgctgttgagaagatgttacgaaccgcaacaggatcgacattgccttctgatgctttaaattcatcagcgtacatgatatagacgataactgcaccgacaaccccgcccaagacttcagcaactgagtaagggataaacattgcccatgaaacgttgcctaagatacattgtgctaacaccatggctgggttaattgaaacatctccgaagatgaataatgaaactgtaatcccaaacccccatgttgtaatggcaaataaatgacctgagccacgatactttgaacctttgaggacttcatcactgtgaaccccaaccccgaaaatgatcatgagcgctgtgcccatgaattctgctaataactgatgaatcatgaataaattcctccaaataataacgatttaatatctaaattttgatagctttaacgcgttacatcaggatagacccgactcgggcatactctgataaacagcaagataaacttgattaagtgccacgtcatgcgccttggcggcagctagacaatcgtcgaactctggactatatttttcgagatcgtcatagttcacgattttgacccgaatatcgccgaagcgcgtggctacagtgataaaatgacgtggcataatggtgcgccccatcgtctggtaacgcacaccaacagttgctgtgtgttttaagatcagataagtcatggcttgttgatcggctggatgaatcatgaccgttagcttaattgcgggccgatttttcttcatttgaattggactgaaaaaggcatcgagcgccccattgtccatcaataaatccaaaaccggcgctaaactttctgctgactggtcatcaatgttggcctccaacactaaaatctgatcggtatcggttttaacaacctgttggcttagttttttttttcgcacaacatcacgcgtaatgcattgagttgcggtgtttcccgattaccaaaaccatagccgactttaatgatcgtttgatcgtctgggattggacagaattggtcgacaatcgttttgacaatccccatcccagttggcgtgatcaattcggtctgcaagtctgggttttgtttaattggaatcgcactaccgacgcgcatttgcatcacagcggggactggtacgggcatcatgccatgcgcgactttgataaagccactcccatccgttaattcggatgaatagacttgattaactgccaataattcgagggcgacaaacgctccaacaatatcgacgattgaatcaagcgccccaacttcatgaaaatgaacatcacttaatggtaggtcatgaacgaccgcttctgattgcgcaatttctgtaaaaacttgtttggcgttcgttttaacataatcgcttaaatcactgtgatcgatgatggcttcaatgtcttttaaatgtcggacgtcatcaccatggctgtgcgtgtgtccatttgcgtgttgatgcgtgtgtgcatggccagttgcgtgtgtatgcggatgttgatgctgtgccggtgttgtttcaataaaaccttcatccttgtgcatggcttctggcaaatggacgtcaaaatcggtgccataaatactacttttagcaatccgttctgcatgtaggtggtagccagggacattcaacttagctaattctgtttcaaactgtttgaaatcaacccctaaatcgagcaaagcgccgatgaacatgtccccactaattcctgaaaatgcgtctaaataaagagttctcatttgtcatcctccgtgtcacttaaatgattgatcatacttgctgagtagcccgcaccaaagccgttatcgacattgacgacggtaatcccggacgcacaactattgagcatggtcatcagcgctgttagtccgccaaagttagtgccatagccaatactggttggcacggcaatcaaaggtttttcgatcaacccaccaaccacactggctaaggccccttccataccggcgaccacgatgacaacttgggcttggcgaatttcatccaaatgttcaaacaagcgatgaatgcccgccacaccaacatcatagattcgtttaacttgattaccgtatacttctgcagtgaccgccgcttcttcggccactgccatgtcggaagtccccgctgtgacaacggcgatatagtgatccgtggttggtagtgggtcaaccatcagtactacacattgcgccatttcatagtacattgctgtcggttccgcttcttgaatcgcagcgtacttttctggggaaactcgcgtacataaaatattttcggcatgtcgttttaacgaaccaatgatgccaatgatttggtccgccgttttaccggcgccataaatcacttccggatagccattgcgcttttgccgacttaaatcaaccttggcaaagcctaaatcatcaatggtctgcgcatgtgccagttgctttgttgcttctgtcacactgactttttggtttgcaacagcttctaaaagctgttgtagctcatttgttgtgtccaaactactcattctttctattgttatttcacaataacccctaaaccatcagggatcactgtcactttggcatctgccccttcaatctcgtaggcccgttctaacgctgcatctaaactggttgccaattccatatgcatgtctgtaattaattgtggatcaaccaaatctgacacgaaaatcacatgatgttggaccagaatccgagccaagatttgtgatgtccattgatcagggaccgtttcaagccgtggtgtattgattgcttggtctaagaattctttaggatccttaacgtcagcaatattgtgatagaacccatcaccaccatgcccgtcacgtgcaccagcgaccatgataatcacgccaccttgtttgttcgtcgcttcagcagcagtcatccctttaacggcttggtaaatattttgatcaagtggatagccaccatttgttgaaatggcgatatcacaatcgatcttgtcgacttctgataaactttcaacgaagtcacagccttttttgtgcgctgtttctaaattaccggcgaatgaaccgatgatgtgcttgtcttcatctaaaacaacgttcaagatgaattcaagcccagcttgtttagcggcataaaccatatctttgtggactgggttatgcattaaattcccggttcttgaatagtgggaattgatgaattcacctgagtggttggccataattgttttgtatgaagccacacccggtaaaacagacttccgcccgcctgagaaaccagcgaagaaatgggattcaatgaagccttcagaaatcaataagtcagcttcaacagcgactttattgataatgcaatcgccacctgatggcaattgaccgattttcacaactgagctgtcatcggttgaaacatgcatgacgatttcttcatttgcaacgatttcttcaccatatttgttaaccaattcttcgtgcgttgatggtcgatggaacccagtcgcaactaaaatccgaatccgtgcatctggtgctacagaacgaatccgtcttagtaaaatcggcgtgatgatatgtgaaggaactggtcgtgtatgatcagaactgataatcacgatattctttttccctttagccaactcttctaacttagggctatcaatgggattgtccaatgatttttcaaccgtttcggcttcgctcattggattttgatacgtagcagcttgtgaaacaagcttcccggcaaaattcgcgtctgcaatattagccgtgataattttttgatcgtaaggtaatttaatggctaccaaactataggacttcctttctcaatgctgattgaatgcttttttaaagctacgtccatagttatacagattttctgaaaaggatgcggtataatttatgaacaacatttcattattacttttaggtgtaacaaatgataacaaccttatagtcttcaagacgtataatttagattaaagttatttaatgattagcagatataataaatcagcacaaagggtaggcagatgcattatggttttaacagacattgaatttttaattaactttttagaggaacgtcacgtcccagtgattaccaaaaagaagcacacatacttgacgtaccacggtttggaagaacggtatacttatattctgaaaaaaggcgtgattaaaaactcgatcattttacaagacggtcgtgaattcaatctctcttacattacccagccggatgtcatttcacttttacgggatgaaatttcaaaatatacggatcaaccgtttaacgttcgcgttgaaacagaggaagcaactttctatcagattgaccgcgtgaccttctggaactacgtgaatgccacccccgagttacagaattacgttaaaaattactaccgcaaaaaattatccgagaatatttatcgcttgcaaaaaatggtaatgaacggtaaaaacggcgggctgtgtgccttcttatacagcttaattgatctctttggtaagaaacgccgcgatggcatcctgattgacttcgtcgttacaaacgaagacattgccggcttctgcggaattagctcgcgcagtagtgtcaatcgcatgctcaaccaactcaaaaaagacggcgtgattgaaaccaccgagcataaattcttaatcaaagatgtcagttacttgcttgataatatcgccaattagcgatttgttaacatatgtaaacatgattcgtgattgaaaacggctatgagacgcgtagccttaatagtcgagaacaaatcagtggaggtttttatgtatgcatattccagataattatttaagtccccaaacgtgtgccgtgcttgcagcggccgctattccagtcattggcttggcactcaagaaagttaaataccaagtcaccgaaaaaaaagaaacggtccccatgttagggatttccgcttcactatcgtttctgatgatgatgtttaacgtgccaattcctggcggtacaaccgcccatgctgttggtgcaaccctattagcgattctcattgggccgtacgccgctagtctagcggtaacgattgcactcatcatgcaggcctttttatttggtgatggtgggattcttgcactcggggccaatattttcaacatggccattatcatgccatttgtcggctatggtctctatcgactattccaaaaagcacaccagcccaaagtgggagtcgtagttggcgcatatctcgggattaatgccgccgcattaatggccggtattgaacttggtctgcaaccgctcgttgcgcataacgcagctggccaacccatgtatgccccttatccgttacacattgcaattccagccatgttgttcgctcatttattagtcgctggttgggttgaagccggctttaccctcgccgtttatcaattcatttgccgggttgcacctaacgaactgttcgttgcaccacgtcaaacagttgatccacaaaccagccgtcgtttacatcgcgcgctttacagtttcatcggcctattgattatcttatcgccgattggcctattagctagtggtactgcttggggcgaatggagcgcaagcgaactcgttacacaactcaaacatgatcacctaggtcacagtctaccaagtggtatggcccatggcttaaactttaatgccctctttagtgactacacagttgctggcgttccattatcacttggctacatcttatcagcggtaacagccgtcattgttttttatcttatcggaaaactggtgatgaatcattattcaacccaatcctaaattaccaacttggcttcaaacaacggaagctacgcccaaaacggtcgcgcaattcgaccgttttttaattcaaaatttgtgctttagtgatcgtttgctgcggcgctttaatcaaacaaagcctcaacctttaaccgcccatcaaacgcctggtattcaactgattagtttattggtgacactcatcattctcgtgttaacccatagtctacttttaatttggttgattggtttattgacgttaattcgaatttgccgcttaccaagccagcatttatggccgctttttaaacgcgtcggtgatatcagtatcattgcgattttattaattctaccgaatttttggctcggccaagtcgccacaacgcttttatttatcgtacggactgaaatcatgttattaaatattgctttctttctcgagacgatcacttggcccgcttttattgttgctttacgtcaattaagactccccagtctgctcattttgacactcgaaattagtctgaaatacagccacttgctcgcccaatttttacaagaatccctctgggcaattcggctacgctcaactggtaaaagccaccaacgacaaaatttagtcggttcactgattggccgcctctacttaagttcccgcaactacattaccgctttatacgatgcgatgattctccggggctacaccggacaagtcacccgacggacgccgctaacagtgaatcgctacgactggcgcttaatcagctgggatctagggctattttgcctattctgtttcattcggaggtaatcagatgctgaatttgcaacacattcactacgcctatacgcaaaccgacagccttaacgatatttctcttaccatcgatgcaggcgaggccgtcgcgtttatggggcctaatggttccggaaaatcgacgctgtttaaattaattaacggtttgattcagcccagcgcaggacaatattattttaaagaccaacttgtcgatgcccgcttcctcaaaaagcctgcacaggcgactgccctccaccgcgcaatcggctttgtgttccaaaatagtgacgttcaattatttaacgaaacggtgcgcgccgaactcgcttttggtccagaacagatgggcttagccccagatgaagtgcaaacccgcgttgacgattgcctcgcgttgttacaaatcgaacacttagctgatcgcgtcccttatcaactttccggtggcgaaaaaaaactcgtcgctttgggcagtgtgctaacgatgaatcctgaaataattgtgctcgatgaaccattcaacggcctatcagccgcctaccaaacgctgattatccacttgctccaacaactcaatcaagccggcaaagggattttaattgcaagccacaacctggctcaagtcaaacaagtcgctaaacgggtggtcgtctttaatgaagaccatcaagtgacccatgacttaccactcgcaaaacttgaacaagaaccggaactgcaacgaactttagcattactctaaagagagtgtgttgtagttactgttaatcgcaggcatataactgatagcacaaatatgcggatatcaaaagcggcggatggcacaaaaataatttttgtgtcatccgccgcttttgcattttatattaatcgccttcgatttgtaaccatccctctgtcgcattgaccgtgattgactgtccaatcggtaacgttaaaatcggctgggtatgaccaacattaacgttgtacaaaacggggattgtcttcaaaatcggaaacttattcaaaatagcgattaaatctgtctcactcagcgcgacatcggttggaatacgaccgataatcaaggccttcggatgttccatactctgtaataatgccgccaaattgcgtgaaaaatcaaacggatctgacccatctgagcactcaatcaataacacttgatcattataatccggttgataggctgtcccttgtaatgtataaagtgtatttaaattaccgcccactaacgtcccagttacacagccagacgtataactctaccaacgattaggctggtaatcccgcgctgcattcggtaagtaccacgcatcactcgaccactctttggaagccgccaaccgaattggtccagcttcctgcgtcatgactttttgccaattatgcgcttgataatcgcccaactgatctaccaatttaaacgaaatataggatggtccataatacgttatcaagcctgtcttagctgtcatcgcatttgccagcgcgctaaaatcggaataaccgcagattattttaggatggcttgcaatcaaatcaaaatcgatatagggaagtagctcattgctgttataaccaccagtcaccgctaaaatcgctttgacattgtcatctatgaaagcagcgtgcaaatcggcaatccgcgcttcaattggactagaattgaattggtccattaccaagacatgctgcccaaacgtcacctgataaccaagtgcactcaatcgatcattcgccggttgattagccacatatccgccaacactttgcaaactattactaggcgcgatgacccgaatctcatcaccttctgacaatcgtgtaggaatcatcttaattcacgcctctccgttaccacttcaaaacgctcacataaacaggcaattgtcggcgtaaacacctgccctgcctctgcatattcagctttaaaaaaaggctcgtgaactgaacgccaataagcaagggttcgatcaccctcgccctctaaaaaggcatgttcagcgtcgacttgattatacttaacaatcgtgcacattatcgttttcgtaattgcaaccggccggtctcgtccatctaaaataacattataatcccccacttgtgggacatgctcatcgggttcatacaactcaatcgcagaagtggtggccgttttttgaccgattattaccaatcgtgccaattcattggccatttgttctgtattcccaaatgaataaatctccgctggttgtaaatcaggtggtaactgctgttgttctataaaatgttgccaatactggctcacttctggtgtcattgacatcccctcttccattcgtaacgttgttgttagtttagcagaatttaaccatttaaccaaaaaaagaaacttacccattaggataagtttcttttgatactttatgcccaccgacgcatctttttaagcatcatcggatagcttttaattaggaaccattgtttcatcttaccggttgtttggtcggcacgaatcccagcaatccctttttcaagcatctgttcaaaagtgattgttggttctgtccactgaccatcaacgtaacacagttggcaatactgatttgacttggtgccatcttgttcactaccttggttttgtgcagtcagtggcatgccacaactttgacagaatttttccatgggtggactcctttaacgtgcttttcaaaccatgttcctacgtttagtctaattagccaaacaatcggcttcgccgcttattcgtctaattttgctaatcctcagaacataaccagtttgaacacacttattttcttaacgtgctttcatcaacagtttcctgcgctttgctacacttatcaaatcatcgactatgtcgctaattcgttaagttatgcaaatgctcagaagctaaccgttgatgacgcacttcttttatttaatattcttcaagaagttaagcaacatcgctgctgatttttggcctgcttctacgatgaattcgtcaaacgttacgccggcttcttcgtcgccgacgtcgctcatcgcgcgaatgacaacgaatggaatcttgaattgcgttgcaacttgtccaattgcagcaccttccatttcacaagagagcgcttcggggtaaatttctttgattgccttgattttatcttggctcgcaacaaattgatcaccggtgacaattaaaccaacacgtggttgtatgtcaaccgctttagccgccgcttcgatttgttgaacgatcttagcatcactttcaaatcgttggggttgttgtggtaattgacctggtaagtaaccaaaggcagttgcttctgcatcgtgataagcgacttcgcttgaaatcacgacgtcgccgatatgaaggccttcaccaatcccaccagctgaaccggtattaatcacaacatctggtttttcttcggctaataaaatcgccgtcgtcatcccagcttgcactttaccaattcctgattcaaccaacgtcacttcatgaccgtacaattgacctttataaaaggtattgccagcaaccgtgtgttgttgcacatcttctaattttgttaaaagcgtccgaatttcttcttccatggcgcaaatgacactaattttcatactaattctctccattctaaaaaaacattaactttaccattctataggaaaaaaagaatcaagtaaacgataataattaagccaaaggtaatcccaatcgcccaattcaaccgtttcttcattcgtttaaccgctggtggatcgactttcttagtccgacgcgttgctgtttctggttcgccttcagtcaccgctttaagggcttctttttgttgttcacgtgcatattcacgttctgtcctgaggcgctcttgatcgcgctgtttaaaggcggcttcttcagcctctttttgttgtcgatattcttcgcgcgtcttaggttcattcgtcatttctaccgctcctattttgcttgtaattgccagtaatacaacgccataatcgttttggcatcacagattaaaccatctgcaacggctgcttgtgcttcttctaacgtcaacttttcgacgttcaagaactcatcgtcatctagcgagcgcttatgcgtgaccggcgttagtgtatcagtgtagtataaagtcattaattcatttgaaaaaccgggtgatgaaaagaaatccgtcacgtgcacgagcttttgcgtcgtcaaacccgtttcttcattcaattcacgtagtgcgacctgatctaagttcttttcacctggatcaatctttccagcaggaatttctaacgtttcacgttgcatgggggcgcgccattgtcgcactaaaaggatgctgttatccgccgtaatcggaataatgccaaccgccccatgatgatagacaatctcgcgacttgcggtttgtccatttggcagtgccacttgttgaacggcaagatcaatgatctggcctttgaataatgtttcttccgagaggaccttttctgtataatccatctgctaatgccacctttaccgtttaatcgctattatacgcgcatttaaaatcgtccgccatcgtcaatgctaaattcaggttcacggccgaattaaaaatccatccttaggcggatactcttttaccttaattcctgttagaatgaaggcatcaattaaatcaggagctgacaattatgtttaaaaaaataacgatttggtgcacaggcatgctcattacacttgtctcaatcccaattttggcaacatgctttgatatttatggtgattgggataatttcatctggttcagccttggtttattattagggctgatctacgttacaatcagcctcaaacggcttaaacgacaaccagaatataaaaaagatcagcatatttcaccacaaatgctgaaacactaccaagatgctggcatgagtgatgacgaaattgactttttcagacaaacgatgcaacaagccgaagcgcaaattaaggtacttgcaaccaacatgcaagctcttcctaaattacgggcaatcgatttaaatcacgatacaaccaaggtcagccaatcgctttttcgtgcgattgtgaaagatccaaagcggcttcacaatgctggcgactttttataccggcacttaccatcaatcaatgaactgactagcaaatacatcgaaattaaccatcatgaagtcaagacagccgatacctatctcgttttagataaatcggctgcggcaattgatgcgcttagtcaacagattcaacaagactacgcggatttcgtggccgaagacgtcgatgacttagacacagaagtctccgtcgctcaacaacaaatcaccccagatcacaaggaggaagactaatgtctgaaacgcccaatccaacaaacgatttaatgaatgatttattaaaagatcctttcgaccaaagtgcgccagttgtcactgaggaagcagccccccaggcagaggcctcaattatcaataagctctcccctgaacaacaagcacaggccgaacaattggcacaacaactggacgtcaacgaccaacaagccgtcttgaattacggcgctcaagcccaaaagaaactcggcgctttctcccaaacaatgctcaaccaagtccaaagccaagaaacaggcgaaattggtgacgcattaacgtcattgatgtaccgtttaaacgaagccaatcctgacgaattacgcgccgaagacagcaacgttttcaagcggatgtttggcaagattaagaagtcggtctatgaaatcactgcgaaatatcaaaaaattggcgcccaaattgatgggattgccgttaaattggacaaagaaaaaaatgcattaatgcgcgacaatgagacgcttgaaacgttgtatgcgaagaataaagcctacttcgatgcactcaatatttatattgctgctggtcagttgaagattcaagaattagaaacaacgacgattccagaagccatggaacgcgccaaaaatgacgataatcaaatggtcgtgcaagaagttaatgatctcaatcaattcaagaaccgcttggaaaaacgaacttatgatttagaattagcacggcaaatcacgttgcaacaagcaccacagattcgcttgattcaaaataccaaccaagcattagctgaaaagattcaggcttccattaacacggcgattccactctggaaaaaccaagttgccatcgccctcaccctgctccgtcaaaaagatgcggtcactgcacaacgacaagtgtctgaaacgaccaatgacctcttgaagaaaaatagtgcgatgttgaagatgtcttcaatcgaaaccgccaaagaaaatgaacgcggcgtcgttgatatcgaaaccttacagaaaacacaaaatgatcttgttgaaaccttacaagaaaccctcaagattcaacaagaaggccgcgaaaaacgccaagtggctgaaaaagaactcaaccacatggaaaatgatctgcgcgaacacttattggcctatacccaaggtcaaactgctgctaacagcggaccaaaagaagttaattaaaaattagtaattaatcctaccataaattgtgcaaatagtaactattgcgttgtttaaaatcaaagattgctttttacgtcagaaatgctagaatatttaagtgacgtttggttgtaaaacaccatatgttgtatatcaataataatttaaacacattttatggtcaaaagagggagactgatgacattgctcgtacttgctggcacaattggtgcaggaaaaactagtttaactaaatatctatctgatcacttaggcactgaagccttttacgaatcagtagacgataatgaagtattaccattattctacaaagatccaactaaatatgcattcttactacaaatctatttcttaaacaaacgatttgatagtatcaaacaagcatatacagatgataacaacatcttagaccgttcaattttcgaagattcattactcttccacttgaacgctgatcttggtcgcgctaccgcaaccgaagtccgtgtctacgacgaattattagctaacatgatgcaagaattgccatttgctgcccacaagaaacgccctgacttattaatccatgtacgcgttagtttcgaaacaatgctttcacggattcaaaaacgtggtcgttcatacgaacaactagaagccgatccaaccctctacgactattataaagaattaaacagccgttatgatgcttggtatgaagcctatgacgaaagtcccaagatgcaaatcgatggtgacaaattagacttcgttgaaaacgaagctgatcgtcaaaaagtcatcgaaatgattgacgaacgggtgaaagccttaaacgcagaacaagaagcaaatatgggtgcctaattgcacaaaaaaagccgttcgacaaattgtcgaacggcttttttattatgcttgggtacctttttgcatccataattcatgaataatgccatacagccgggcatagtgatcgctactagcatttaagcgccacgtaaaatacaacgcctccggattaacgttttcgggtaaggcaatgctcgacgtccgaacaatcaggtctgcatcccgtaaagcttcatcggtcgtactaacagcgacatatttgatattatcgagtgctgttaagatatccatatagccaatgtaatcttgctcaatcacgagtgcgaccttcacctggcttacaggatgatactgctggatgacttgttgaattaaattatagtaagcctttatcaaattctcccgcccacttgctaaaaaactaaaagctggttcgaataagaggtaatctacggtatcactaatttttttatggagtagttcattgggttttagctgcggcatacgaatgactaattcattaaaaacgacagaggtcgcgtccatcccaaggatataggtcgtcaccgtagtcgttaacaacgcatttttgaaaatatcatatgtgtgctgcgaaatctctaactcatgcataatatcaaatggaatacgctccaaaaaggcagtcacaaaacgatgaatttctggtatataacgttcatctgcccaatcagcagtcaccttagtacttgttattgagcgtaacggtactggacaataccgtaacaagaagaatagtccagcggcttctgaacgcccttccgttaacgttaactctgccaaacaagttcgtaatcccgttgattctttagtgaaatcggctgcaagtaaatcactgattaaattaggatagggataccgaatagttgctaatttttcatcgggctgcacgactgcaccggccatcactcgataataagttactgccagaatcgtggcgccaatttcgtgcgttaataggttaggcttttgcaattgaaattcatcacagacatagtcaaaggccgacaaaacacattcgtgattgatttcttcaaatagccattgatgcccaccagacgccaaccagtataaggcggataagaccaatcgaattgtcttctcatcaccttccaaccggattggttcgtatgaaacccgtaagttgaaggcgcgggttagatcgcggacttgcttcaaatgacgtaatacagttgctttactactatcatgctctgctaagaaggttttaaacgatatatccccgccccgcaatagaatctgtacgaaatcatagatgtcagaatgttgtactaaatataaatgatagacatcacttggaattgcgaagagtcgcttaacatcatcttcctccgtccctaatattgcctgcagatccccaacaatactgacatacgtattgtataagctactataattacggtctaacaatgttgccacttgcttcaaattgacgtcatcgattagtgcttcgccctttttagccatgctcattcgttttctaatgggtaattcatcccatttgacattaataatatctaagaaaagagcatacttatctttttctgccgatgttaaataaacactatcggtatccacattgcttaaccccttgttccaaataattgatatatattttaccatcaatcgatattaaagcataaccattctacagcgagatttgttgcgtataacaaaaggcgatgcgttattaacacacaccgcctcaaaagctgaaaataatttcatcatcagctctaattaaacctgacacgctaataacttaaatcaccaattgccatttcaaatcagcattatatgagccaatctgataagcatcattataaggtagtgataactgtaactgactttgtttccaaccaactgtggttccataactcgttaaatcttgctcactgattggccgctgtagaatcccatcaatccattgattatcgggtgactcattagttaatgcttttgcatcactatcatttaagcggtatttaaaattttcttgcatataaaagggattattgggtcgttgatttatccccagatagcctagttgtaaatcaaaatgactacacaacggattacatatgactactttcggcgcttttggtgtaccagtatctgccacttttagttgtacacttggtacctcatttagcgcaatcgtccgattagtaccccccctacttcgacccaaaatttcgtcatcaaacgtaattgttttcgggatgccaacctctactgccccgtttaaagttaatttgaattggaatttagcgattggatttaaatcatcatttgcaataggtgcacttgccgccttttcagacaacgtaaactcaatgtcgcttgtccgcatgacatcacaatgcagcccttgctccgtagtagtcggattccctgtctgattctgactagcattaattagctgtgccataaagctctccgataaatgcaactgcgaatcggttatcaccggttgccacactacattttgatctgcattaacacgatagtataacccaaaagaatcaggcgggttaactaggtcgacttgtcctgtaatcccgtactgcggggccgcatgcagtgtgccatccgcataattaaactgcgcatggccattcgattttacagactgtgcatttttggcacccggatcagctaatgtgacagagcgaatctcaggcacctgaatgcctggaaaatcgtggccctgaccaaaaacggctttatcatgattgggtgaaatcggagcatcgggtatgtagattagttcacgaataatactttcaagtcgcgattaaattcagtatactaaatttagataaacaaacttactggaggatagtattcatgcggacttggcaaaaatggactttgattgttctggcacccttcttaataccaattatgtattttgagaaccaatattttatgagagagcagtttaaacagtcgcaaaagaatatgcagcagtcaactttaagtgattttaatgaccaagcaagcggtcaatacgcggcctttaaaatctacgctgtagccaaaccgcatggaaaaatctattattttgtcccacaaaaccaaaatggggccaatatcgatttacaaaaacaagaagtcgcactcggtaatcagctttatgcaaaagcacacaaagaatcacccgacattgaccatatcacgttgtacgtcagttatactgctaagaacttgcaagacaatacgtatgcttttaagccaaccgccgaggcttatggttttgtaaaatcacggtttaagacccgttatcaacgcttattttcacaaactggaactgaagccatctatgatatgcagcacaatacaacatcggtttcgtttaaagatttacaaaaagatagcacaacaattccgatgattcgtcaacttgcaattaaccaacaattacaagcccatgattatacccccgaacaacttacacaattggaagcacttgatttcccgggaaatgatcaagcaaccaattttgactttacaacagatggtctaacattgaaattcgcaaagaatcctcttgatattgaaacaattgccctgccaatggcaacggttggtccatacctcaatcccaatcttgtcccagaagacaatcaaatgccttccaaaaaaggtggtgctaaaaagattgcactcacctttaatacgacattaaaacctagcactattacgagtgtcattaatcaactaaacgatttaaacatcaaagcaacttttttcactactggtaaagcagctaaagaacatccggatcaactgaagcaattactcaaagctggccatgtcgttggcacccaagcgtataacaacgatgatgacttggatacaatgagcgcgtcagaaattgccgataacctcaagcaaaccgatgccgcctacttcaaagccagtggtcaattgccacacttattacgggtcacaaccgaaacccctagtacggaattaacaaccgctgctagccgggcactaatcgcttggagtgttgattcggaagattggcgcttagatattgatgcgccgacaattgtcaaaaatgtaaatgagcgtattacaggtggtgatcttgtcctactgcacacaagtgaggcaacgattaaggcattacccgcaattgctaaagaacaaaccgctcaaaaacgacatttcgtgacagtcaacgagctcttcaagcaacgattaacaccttatcaacaatatttcaaagctggtgatcaacgctcgctacaataacgcaaaaaggcccgacaacttaaattgtcgggcctttttgtaatctaaacgtgctccgtaagccgcacgctatttatgttttgataaatcaacttcttctagtggaatcatcttagttttgtaccgtactttatagtaaacatatagtacgacaaacaatggaatgctcatataactaatcccaatcgctgtccaatcgaagttcttaaaggcttgaatatcttgccctgcaatcaccaataaacaaagcacgaatgcaaaaatgggaccaaatgggaaccaacgtgcatgatatttcaattcgctcaactgatgaccttgtgccttgaacgcacgacggaaacgataatgtgacacagcaattcctaaccaagcaataaacccagtcaacccactagctgccactaagaataaataaatccgagttccaaaaatacttgtcacaaaggttaaagctcctatgattgttgtaccaatcagtgccattactgggacgccacgtttgcttgtcttagcgaaaattttagctgcatagccatcttcagccattgaccacaacatccgggatgaagcgtacatccctgagtttgccgctgataacactgatgttaagatcactgcgttcatgatgctggctgcagaagctaacccagcccgtttgaacactaacgtaaatggactaacagcaatattcgtttcactcgcgcccaacaatgagtggctatcataaggaattaaacaagcaatcacgaagattgaaagaatataaaatagcagaatgcgccagaaaacttgtttaatggcctttggaatactcttttctggggtctttgattcaccagctgtaatcccaattagttcggtgccttggaatgagaagccagcaatgacgaagacactcaacatcattggtaacccaccaacaaatggggccttcttataagtgaagttactcaagccagtatgatggccacccataatcccgagaatcgttagtaacccaacacctaagaaaataatgaccgtaatcactttgattaacgcaaaccaatattccgtttcgccgaatgatttaacactcgtgatgttaatcaagaaaattaataatagtgcgactaagctaaaaatccaccctggcatatcaggaagccagaattccgtaacgagtgccgcggtactaatatcaaccgccaacgtaatcgcccagttaaaccaataattccaccctaacgcaaaaccaagggctggatcaacaaaccgcgttgcataggttgagaaagaacctgagacaggcaagtacgttgccatttcacccaaactggtcatcaagaagaagaccataatcccaatcccacaataggctaacaatgcaccacctggacctgcctttgcaattgctgaaccacttgtcacaaataagcccgtcccgatactaccgcccaacgcaatcatcgaaagatgccgcgtctttaactcccgcttcatttcatttcctgccataatacttcgctcttttctctatgatttcaagaaaaagccccaaccacgttctagcaaacaaaaaaacagtctttttgtctgctaaaaacgacaaaaagactgatagccttataatatccgttgatagcgccccgtaacatttcgttacgacagtccttgatttattcaaccaagtcccaacatcaaaatgaataagcaaattgacatttcggcaaattcccctttaattatccctcattactgcttagtcagttcaggataacgactcatggtttttgcgacctcttatcttgttagaaatgagtatacagaattcacacaaccacgtcaattatttccattaaaaaaccacgattatttcaatcgtggttttcattttgcttattgttctttatctttgcgtgatttccgccataaaagaattatcaatagtaggataatgacaatcataataccgataatgacatataaccaccagttattgttctctggtaattcaacggccttatcgttatattttgcaacttcctgacgggtaatctcgcttagtattggttcctgtataatcaatcaatccattttcattggttgtcgctgtcgtaggggtcacatcgaccgtaattggtttcgttccactattttgaacccgcacaccaacttcttgttttcgaccaggagtaacttttaaatcataatagcccaactccgtatccgtttgattatcaggatagacgggcgtaaccgaataagtcactttctccgcctgaactggttgatgactaaccatcaacatcaggccaaaagtggcaaccaccgctaataacaatccaaatcgttgcttcattcgtctcattctattcgctactccttctaattcagagtacgttttatgtaataaaataataagttttcagcaaatatatatttttaattttggtgttaattattttcttcactattaatcttaatcctttgttaacaagtggtacggcgttaattggatatgccattgtccattttttaaataaattatcaattttctgaaactatcaactaatcaattgaaaactaattttcaattccagcacaaaaaaagcaatccaacaaccggattgctttcactctattttaaatttttaatgatcttctggatgagtaattcacgctgttcggctgattgattccaatcaatcactggaatggcttgatgcccaattgtctcaataatcaagccagaaacagtttgccgttttaactcgttcgcccatagcatgtccgccttgtggaacgcagcgttaataatcaatgttccttgtttagcaacgggttggaagtcattgaagaccgtatccaacttacccgtatctggataagacttaatttgtccttccgtggccaacacaacatcgtagattgaaacttcatcggctggccgcgctagtgtaaaaccaccactattaccagaagccgatttcactagcccagccactactaacttacgaataattttgcgtaggtaagtctgtgacccgcctaagcgatgatgaatgacttcagacgaaattgtgtgttcaggatcttgcgtcgccaaaagtacgataatacaagttgcttgttcaaacgcccgtgttaaatgcattagccctatcccctttttaacagtcgcgcactacgcctttcgcgtcttagtgaatgaaccagaggattgacctgcgtcggtttgtacctcaaacccatatttttcaagaatgtgtgcaactttcttaaaatcatctctatcgaacgtactgatattaccatcaattgtttcaatttccaacttattcgctaaattacagaaggctttcactgccaattgtgctaaaccaagattttggaaatcataaacagctaagcgtgaagctgctcctaatgtttcaagaactgtaatgtgcatttcttttttccatttattggtttcaaataagagttgtgcttgaaaatcaaccgttgaatgtccaaagcggtcgacgttagcgtatggtgtgtagacaaaaatcgaacttgtcgattcttgttgaccattttcgcgatagtctgtatagacgatgtactgcttaaccttttcatcattaacctgattcatacttgatagaatcgtcaaattttcgtttgcctcaatttgcgctaacttccgtgcataggcttggtcgttttcgtttgccatttgattaacccccatttgtctttcaaaccgattataccatagctttctcatttaaaccgtgatttattacggttataaccatgttatttttacaatttgaaaacgttcactattcggcggtagtactgaactcgttgcccgcctaaataatccggtagttgtgattgataagtcttctcgaactgaactttctgtaaactcgcttgcgatgcttggttggttaaaaagcaggccgcattaaaggtgtttacaccagtttcttgcgcataggcttgcatcgttgccggcaatactgcgctgataatcccacgtcgttgatatgccggtaagatggcaaaactgagttcatatgccgcgactgattgtccatccgcactaagggtaggggcgagcattatcaatccttgcaccacctgcgttgtgcgatcaacaatcgcccaagcatcctcatcattcatcaacattgttagaaacgactgtgcttcttgttgagattgaaaagccgtcatatttagctgcgtcacaatctttttttgacaaccaatttgatagaccacttcaagatccattagttgaaaatgccgtagttcagttgtggcagtcctaatctgcatctggaacaactcctttgtcatatcaacactcatagtaacccacttacagtgttgcgccaagtaaattcttatgtttccattaaacaaaagcgccaaagttgtggtataccactttttcagtttatactaataacgattaattactcttgtagaaagcgagcataccgatgacattccgcgattatttccatttattttcgaccgtttctcaacaagccgaatcctatgattattttttacactttattgagacacctgttcctgatttacaacggtatcccgaattaactaaaatttgtgattgggccgcttatgatgatcacagttttcgtctgtggacaagcttgcccctcgacgaattcgagcagcgttttgctgaaactgtcccattaccaagcgattcttaccagttagattacagttacaatttgcaagatacaaattttttctaaagttcatgcttgacttttaattcgaactaccgtaaattgaataacaatcataagtcatcttaattcaaactaagtagtgcattatctgggtgtcagaaagtcggtggttgctgcgaaccgatcagggtaattgttacgaaatactgaatggatgattcggctaattaacaggaccgttatcacctgtaagagtggtgtgttaccttaaaatgacacgctaactgggtggtaccgcggtttccaatcgtccctattcgcatcagcgagtagggactttttttgtagagtgcgttatttagcgcttaatatctgaacatttgcatagaacattgccaatcaaaaacacatttcaactatggagggattttcatgttcaagattgcatcgtgcgggggaatcctccgttatcagtcttttgtcgcaccagcctaaccattaaacttaaaaggatgcgatttaaatgacaaaacacaaaactagtttattagaagcaagtatcgttttacttattctgctagccatcatgggtagcggcgtgattgttttccaactttcaccacaaacacccgtcttaacggcgattgccctcttgattctatgggcccgttggcggcactttagctgggacgccattcattctggtatcgaagatggtctcaaaagcggaatcattcctatcattattttcattctcgtcggcgccttaatcagtatctggattgccgccggtgtgattcctagcctgatggtctggggcttcaaaatggtcagtgtacactggttcattccctcgattttcgtcgtctgtgcgcttgtcggcagtgccatcgggagcgcctttaccgtcatttcaaccgtcggcattgctttcttcgggattggagccacactcggactaaacactaccatcgtggccgcagctattatttccggggcaatattcggtgataagtcatcgccactttcacaatcaacaaacttaaccgcagcggttactgaaacagatctatttgaacatattaagaacttgatgtggaccacggttccagcgtttgttggctcattaattttatacgctatcattggccacacctcgaaaaatgtctccctcgataaaattggtgcgacggttgctgtcttaaacacgcacacttcagttagcctacttgcactaattccaattatcttaattttcgtttgtgctcgccttaaaatgccagcaattccaacactctttttaaacattgccgtttcaatcggtttaatctttttccacaacccacacacaccaattgctaaaattgcgagttacattgaaaatgggtttgttgcccacaccggcgataaaagtatcgatgccttgctctcacgcggtgggattaatagcatgttaagcaccgtcgccttaattatcttgaccttaaccctcggtggcctcttaatgaagcttggtttaatcgaacgcgtgatggcccctcttgctacccatcttaagacgccaggtcaattgctcagcgccgttattgcttctgggattggcgttaacctctttatcggtgaagaattcctttctgtgattctccctggtaaagccttcaagagcacctttgaaaaatcaaacttgagtaatcttgctttagggcgcgcccttgaagatggtgggacagttatcaactacctcgttccatggggcgtcgctggcgtttttgccgctaatactttaggcgtccctaccttgagttaccttccattttgtttcttcagtctcttatcaccaatcttctcaattctcagtgccgttactggcatcgggttaaagagaaaaaccgcctaaacacgcaaaaaaggcccaggataaaatatcctgggcctttttttacattaattgcattaggaattgaccgccatacaccagcgcaaaactatacactgcaattgaagctggcttgcataaaataatgatccatgtaaatttcttcaatgacatctcggtgagcccagccatcaagcataagacatcgtctggtgcgaccggtaagaaaatcgcaagtgcgaagaagcgcacaaagtttttcttttccataattgtcccgatatacttgtcatacgttttttcactgatgacgtgtaagatgaacggcttcccaaattgtcgtgctaataagaagttcaagatagaaccaattgcaatcccgacgtaattataaacaaacccccaaagtgggccgaataccaaaaccccggctgcggtgctaatcccgcctggaatgacaggaatcacaacttgaataatctgaatcgtgatgaaaatcagcggaccaattagcacagagtgccccaaatacgcctgcaacgcggtcgtgttattaaaaagaccaagccgagaccaataaatagccaatgagatgcttccgattaatgccatgagagacgttgcgctgattaagcgtcttgaaattgttctactcatccgctgaattccttccaaggttaattttaattataatttaccacattcaacattattttttatcggtcgctagtctgatttaaaaaagcttaactttctaagaacgtccgaaatggtttcaatccttgtgcatgatatttttcaacaaaggccgctacttctgctggatcctgtgtttgatcatcaatcacgagttgttcaacgggtaacggacgttcgttagcaattttaacatcaatcacaacaggttccttcgtgcctttagcagcagcaaaagcagctttcaattcagctaatgtccgtaccgtaaatccttttgcgcccatcgctgttgctgctgcaccgtaatctgccccttgaatggcaacccctgagtgtggttgacccttatcatcttgttcagcttcaatgaatccgaatgaatcgttgcttaatacaacgttgatgattggcatttggtatttaacttgcgtgataatatcttgcatcaccatcgtgaagccaccgtcaccactaatcgaccagatttgacggtcagggtaggcagcctgggtcccgattgctgcaggcactgcgcaacccattgtggcataccatgctgataacgtcatacgttggcctggatgcattttcaagaaacgcaccccatcgattgaaacattcccaacatcgagattaaagatggcatcgtcagtggccatctcattgatttgtttgaagacgggttccacacgtaacggtgtttgatcgtcttcttcaaaactggctttccattcattccagttttctttattggcgagtgctgctttataaaaggcagattttttggcaactggttcactcgcggctagcaatgcctttaatgccgtcttagcatccgctaaaattccgacatccacatggtgtctgtgtcctagtttagtaggatcgatatcaatttgaataaatttggcatctggcttgaagaagtattgaccgaattcataattgctaccgacaaataagattagatcagcagcttctgccaaatcaactccgggtttcgtggctactcgcccagctgaaaccatataagctggatggtcatcggcaacaatcccttttgaaagggctgatgacatcattgggatactcaaccgatcagataaagcaaccaattcttcacccgcagcacgtgcaccttgaccaaaataaataatgggttgttttgcatctttaattaactgtaatgtacgatcaatatccgcgcttcttggctctggataattgcccatttggaataagtttgcagtggcctcgaagttatcttcaatcggttcccagcctaggttagttggaatcgtgacaactgctacgccgcggtgtttataggcttgttgaatggcttggtcgactacaagtggcatctgttcagccgtcattaccgtccgattatagactgccacatcagcaaacatggggttttcattcatttcttggaaataatccgtattcatcacacccgtagcaacttgtccaactaatgctaatacaggaacattatcatatttagcatcatagagaccatttaacaagtggactgcaccaggtccggctgagccaaatgtagcagcaatcttgccagttgctttggcttcacccgccgctgctagtgcaccgacttcttcatggcgcacttgaatgtaacgcataatcgctttctggttatgtagtgcattcatcgttgaatcaaacgagccaccgggtaaaccaaaaatatggtcaattccccagtctgccatgacttttaacattgcatctgatgcgtttattttctgtgctaccattaataaagacctcctgatgattttatgtttcacttacttaagtataccgcttaaaatgtaagcgttacaaataatcctgaataattcatactttgttgcgtaaaggtaatttgccccttttaacgtttaatttagctcaaatttaatccgcaactatttttgagtgtatttgagctatttttaagacaattttatttttgattggtgtcaaaagagtaaactactcccttgatcgtacttaaattttttaaattgtcttttttaattactagtgagctgaaattcttgaatcctaaacaatgtttgccagtataaatcatcaaaaacattggtactagaaagatgcagccataatttacgtgcatgttgggtgactctgccggccaaatgaaagagcttgaaacgtaaagtggcgctcgttgcgttccctaattcagctgagaaaaccagttttttcatggcttgaactaagttataagccacaccggcgagtaacattctaaactggttagccgtaaaactggaactatccgttttatcaaaggcaaagccacttttaacttctttgatcagatcctccatggctccacgttggtgatagagttcaaagacgtcactggcaaaagccagctccaagttagtcacgataaattcgtgtttaaagagtagctcgccagcagggcgagttgatttaatgatcacggggtaagcgcgaccccaagtgtccggttggtaatctgtcaaacggtgccactggacatctttttcggcgaagtcttccccaggttgccccacatggatcaagtgctcggcgatccgttgtagttttggattagccttgagacggatcgtaaactttgccccagcttcttcacaggcggcataaatttctggcttggcaaaacccgagtcagcccggactagtacatctaaagcagcgtattgtttcagtagcggtttcaaaaaagcttccgcatttttggaagtgtattcgttacctggccgtaatttagctcctaagagacaacccgaaaaaccatcaaaagccaacaggggatgataaccgttcgtttgataatgggtgttaaaagcactgcctttctggtaaccaaatgtatcggaatgagtcgaatcaagatcaatgatcagttgacgttgcttcttttgtgtgatcactaactgcgctaacttggcgactaattttgtgatcccggccaagtcgtctgcggaaatttggttgatatagcgtgaaagagttggttgcgaagcaactaaattatctaaaacaagctcaaagctcatgtctgcggtcagtttattagcggcagtatcgtcgaaataacccgcaatcagctgaatcaacagttgtttaaacagctggttcttatggtacctatagaacttgcggttttccttaaaatggagagtttctttcaaaaggcgcttaaagtggatctgatgcataaattcagccactaaaattagacccgcatcgttagataaatgaccaccattattagaaagaaccagatttttgttgaagttaacggtttgttgttgtaaagtcgacatatggagcactcctgttctgtgttggttttggtcgacttaacaatagcacaggctgtgctctttttgtatacgcaattaaacacctaaaaggtgttggtttggatcacggacaaacaagatgataacaggcaaagaaagaaaaactgttaaagatatgaattattcaggattattattagtaaaaatatgactcctaacaagcaaccgcagccgatgttgaaaaagaagctcaaaacgctccacacaaaaaggacgcataatataaacaggaatgtcagcatcattgccacctctttatttgcaaaccacgctcacttttaccggcttagatcaactttttcattgatcagccacacaacaatgtcgccaattaaaaccacaacaaattcaccaatgccgactgtcaaatatgtcatccaaaacaaaacttcactgaccagatgtaattctagtgcgactgcctatgacattccggccccattgatgactataaattagcaatcaaacacccctcatgtaacgtttgttgaaaaccaccatagtattgagcagttctgacaaacgaaattgaatcggtctataactcaatggtgtaaaagcaaacgttaaaactacataaagtgcagcaatcaaaactgttttagtgatctcagcaactttattattaagacgtgccctttttaagaatctcctagtttttaggtgggatggtcacgaaccaccatgtaacaagtaattattccattaatactgtactttcaagtatagaaaaaagacgaccgtttatcaacctgaaaagcatgttataattttattattagacattttaacaaccgagtaactagtcgctaaaaatcgtggatcaactaactgtctagcctaacaaatatttgacacgacccacgaaatttatacaatgaatggatattactaatgaaaatcgctattttaactgacagcgctgcgatgatcagcagtaaagtcggatcacaaccgaatattagggtcttacagatcccactttcattggatggagaagcttattatcccaatgaattaccagaagttgctggaatagaaacgctaagggaagccacgcttaacactgtaacagaagagcagatccctctaaccacaatttctgcagtaaccgatgaacttcaacaagctggttatactgacgtactttgtatacatattgccagttcgatcagtggcttaggctcaaatctctctactttcgccaaaagctgtcaacagcagcttaagatccatctctttgattctcatactcttggtcctgcagaaggagcgttggttgaacgagcacttactatgattactcacggactaaaaattgctgacattttagcagaactaaccaagtatcgccaaaagcaacatacactggtcataatggaaaatctcaaaaacttgcgtcggatcggttctatttcaaataatgcacatctcttcagtaataatatgctgcattataaaaccttgctacatttttccgaaaatggtgaacttgaagtcttgatgaaaagttcacgcacgaaaaaaattgcaacggcgctattgaataagtttcgcagctctgcagcaaaaccggaactagcaatcgtggcagacaatacaatggtcttggaaaaatatgtttcttgcctgaaagaaattatgccgcaacttcaactagtaactgatctatattcaccttcgatattttccttcatcggtccacaagcactgatcattagttggcaaaataattaactacatgcaaaaagatcgtccttcaatttaaagaagaacgatcttttttgtttgcagttctcttatattaactttttgctatttaataacggactcgcaattggccagcttctcagctttctgcttagttatctaaatcaaattgacccgtcagtttttgcaactgagcagcagtttcttccaaggtcgaaacatgttgggtaaactcatccatcgtagcttgcacttcttcagagttagccgaaacttcctctattcctgctgcgttttcttgtgttgaagctgagatgctttcaagtttatctaagatcatcttttgagtttcactgatctcttttgtaccctcatggatcttttgaacatttgcacccatagcttcattatgcttataaacgttcattgtcgacttgatggcttctgtgatcaaaccagtctgtttttcactgctttccagtgagtctgttgttgtcttgaccaaaccagttgattgctgtctgatctgttcaatgatcgactcaatttctttagtcgaatcattactttgttcagctaacttccggatctccgctgcaacaactgagaatccttttcctgcttcgcctgcactagccgcttcgatcgatgcattcaaagcaagcaagttcgtctgtcttgcaatatcattgataacgttaatgatcttagtaatgttttgtacatcactatccatttcctgaacactactcatcaaagcttgcattccgttgatctcatttgaccagttaccattgaccttgtccatgacatccaggttattttgtccaacttttgaagcttctttggatgaattagcaagctcttccatattcgcattgacattatcaatatgtgcagtgattttttgaacgttatccacgctttcagtagtttcttttgcttgtgatcctgtcacttcagcaatttcagtgatcgtctgtgcgatttcttcagaagcagttgttgtttgtttcgaaaggtcaagtaatgatgcagctttttcagaaacattcttggcttcttgctgtgtttgtccgatcagaacagtgacagaagcgatcatattattgtaactagccgctaatctgttaaactcatgtccattcacatcagctctggtcatcttttgagctagacgttctattggtaccttagaatactcgattttttcacccactgcaggcacgtaactcatcttaccttggccagcatctataaagaacttctcaagtattaataaagcacgtttgagcaaacctgcactatagtaagatattatcacggctaaaatgatgatcgccaacattgagattgtcaaggttatcaacatatgatgtgtgcctgcgctcaaatcactattgttcatttgggcgatggtccaattgtcagttgtgccattgcccttgtcaaaggtaaccttattgatctgcgaacctccaggaactttgatcgtccccttctttttcgctgaagcagccactgctttataaacggctgtcttgttgatcattttacctgctttaaaagtattattgcttttaccagtgttctttttgatcaaaaccctgccggctttagttaaaacggcggcttgaccattgtttccgatttccatcgattcaacagatttttgtactgatgaatatgaaacagtaactgctaaaacatgggctttcccctgcttatctacgattttctgggaaacacttgcactatacgaatgattagccggatcttcataaggaatcgaccaatatgcatgtcctgtgggtgctttttgataccaatcttgatctaaaatattcatatctttaggcatcgcaaaattcgaataagcatatgtaccatcagtgttgacatacatcaagttggtgatcgttccctgggcgtcgccattggcaattttcaaagttctgttagcatcttttaagttgacattattggtcaactctggtcttttttccaaactagcaatttgtccagtaacatcttgccgcatgtcaacttgttgccgttgcaaaacatttacagccgtcacttttaaacggtcatttttctcgatcaattgctgacgtgtattcccgtatgagatcaaattcattataattgccggtaccaatgctatcaataagagtgacgataaaaaatacttctgaatactctttttagcaacttttttcttacttgccattttctttccccatctttccctaactatctaatttgatcccctaaggatctcatgactatcgttcacaaaagcactgaagcaaacaacccctaaataatatgtttgccagtatttgcttttgcttgcgctgaagtcatcaaattaacgagcaattactgctcttttacccctttagccccactaaaacaaaacataactttaacgcagataatctaatatcgaagtttgcatgaccttagtccccatagccaaggtcgaacgatatgcaatcatttgattttgatattccatatacttctctgtaacatcaacatcttgtttattagataaagtttccgctaaagtatttttctcagatttatttcgagctgatgctgaacttaaacgattttcgatcgaaccgatcttagatctatagtcagtaaagttttcagtaaatttatcgatccctgacaaatattcactggataactttctatctggatcccccgatttcaaagtatcgatcaaaccgctaaagaattcggtcagttcagacttgctatctttatcaatgccagacgaaccatcggcatgcatcaaacgtgaaccatcagtagctaaatctaagctgacaccatctgagatctcgcgctgtaaattatccacgttgcctctgtattctaaactgacagctgccccttcagcatctttaataacagcaaatggtggctcttgtgtctttgtccccccaaagatatacctgccatcatagttggtattcaaggcatcaactatccctgagatcgactgtgagatttctttacggttcgcattgtaaacggcaggtgtagctgttccgctattggccgacgactcgatcaaatttctaatgttaagcatcaaggtcgaaacattatctaaagctgagtcttgcgtttgcgaccagagcgtggaatcagaaattgtttggccatacgttttgttttgtgaaattgaaacattcagatctaagatctttgcgactaacaaaggattatcagaagccttattgacctctttcaaactagacagttgattcattgtcttttgaaccttgttagtactgatctgtaaattcttcaagaaatcagaatattccattttactggaaaccctcattgattaaacccccgttctattgatcaaagtatccaacatttctgaaacgacatttaacaatttggcattagcttgaaaaccttgttgaaatctgatcacatctgacatttcttcgttcaaattaacaccagaagctgcttgatctttgtattccaattgattcaacgctgataattgagcagatgccatattgtctgctttttgtttagatatcccattttttgtaacaatactgttgtaagcacctgggatcgttaaaccctctttagaattattgaaggtcaaagtatctttattataatttttcagcaaattcgctgtatcgaccggataaccaagcttactctttaaagctctagccatcgctaaagcacgtccattatctccttcggccggatcatcaccagtaccgactttcattttgcctggatctgcgactaaatcatcgttgatcttaatacttaaagccggatcactgagatcagtgatttcaaaaaagccgctatctggagtttgcccgtcagaataaacgatattttcaatttctacaacgcctttagcaaaatcatttaattcagctcgatggctttccacttcagccaatgattcttgcaaaccgccgatcgaacctgacttaactgctaacttgctatacttacctgaaccgttcgctgtttcaaaaacgacttctccgaccgtgaagtctccatcgatcgtttgctttggttgtgtttcatcaccatttggcaaaatctgagctttgccgtcagagttactgacaacaacatttaacttagtctgtactcctttttcattgtcaaccactgcatggtcaccgatactaagtgaagcacggccatatttgtcaaacgaaactgttaaattactttcagcagacatatcctttaataaactatcgcgctgatctaacaaatcattgggctgttcatcacttaaatgactgtcatacaactgttgattcaaattagcgagttgttccgccttttcattaaaatctagaacagttttcgccaaagaagaacgtgtatcagtagaaacttgtgaaacttgccgtgcagtttgctggatataagaagctaaagcaacacccatttgaacactattagttttagccgtatccaactcgggattgtcggctaacttttgtaagctgtcagcaaaattattcaattgtgtaatgagtccatcgtctgacggctcatgtaatgcattttctaataaagccaaaacatctgacttttggacgttaaaattgtaatctgaattagaatctcgaacctgtgaacgtacaaagtcatcaacgatccgtgagataccatcagcttgaacaccgctaccgatcaaaccgactcctgtttttgcataagggatcttcgttgataaatcaacacgttggcgcgagtaaccttcggtattagtattagcaatattatgactgctagtctgcaagccgatttggttagcatctaacccactgcgagcagtattcaaagtaccaaataaacctgacatgaaagtcctcctaaagaataacaaggtgaagtgaaccgcataaaagttgagcactatcggactttgacaataagtcgtggtttgcgacttgttggcgaagttggataggcacagacttttggttcacgcaacctgactaagaataacaaggtgaagaaatgcggttagaagccgagcattaacggactttaacaataagtcgtgcatttagcgactttttgttgaagttagttaagcacaagcttttgcatttcgtaacctgactaataacaaggtgaagtgaaccgcataaaagttgagcactatcggactttgacaataagtcgtggtttacgacttgttggcgaagttggataggcacagacttttggttcacgcaccccttctacaacctaaaatgactgatctacgattgccgcaggaatatcttctcgcttaggttgactttgagtcctatgctgatcaacataagtattttcctgtttttccaagctgtgttggatcgtatccatcatttttttctgataagccaaggcttgttgcgtcaacaataaattagtttcttgcaactcttggatttcttgaatcagcatctttgttttgtcgccaatttcaccagtatacttctcaaaaatcggtaagaaatcttccttttgcggaacaatttcatttagcgattctccgtcatcaagaactaaaaacttttgttcacgtttcagtattttgataaataatttaagcttagcctgaaatgccttttcattcatctttatttccttcttgtttcatttcctggaacatctgatcagcaatcttttctggtgagaccttatatgttccgtttgccaactgctgtttgattttgtcgaccttagccgcatccacatcatcgtctatatcacgatttttagcgttgtttactaatctttgagcagtatctgataatttaacattaaactgttgtggtgcaccctttttcgttgttttcgaggcttgattgtgatagtagttttggatcatttgtgaattgattgaagaaatatctcgattaattttcatgtgaatgcctcctttttcctttttgactctacaaatacagttatcggccaaaataaaaaaagttaaacctaaaagttcaactttttttaacttaatttattttattgatcctttgtttttgagaaatgatcttattgatccgcacgccaaagttttcattgatcacaacaacttccccagttgcgatcaattttccgttcaacatgatctccaaaggttcgtctgttaatttatcaagttcgataactgaaccagtgttaaagttcaaaatatctcgaacagtctttttagtccgccccaagacaacgcttaggtttaatggaatatctaagatcaaatctaagttatcaccgctgatttcttggtgactcgacaattcttcaaattcgggtttagaaatttccacgttactgacctgcgcctttctttgtggttgttcattgcttggtttttgcgggatcttaacttgttgcggagctggttgtggtttactaatagccttggctttctcgactgctggtttctccgcatcacgtttgacaactgttgctttgtcagacatcattgctttcacaatatctttgaccatttccaaagaaaagatctgcataatttcactctcgatcagtccttctacatccaagttaaatgaaatacaataaatttcttcctcacggtccaaagagtcttcattcacatcgccgggattttcccacaaatgcacttttggaggaagaatatcgactttttggttgatcatagtagccatggatgtcgaagctgaaccaatcatttgattcatcgcttcacccacggcacttaattcgacttcagtaaattcttctgaagctgactttccatcgccacccatcatcagatcagcaataaccgttgcatcactgacctctagcaacattaagttagttcctgctaaaccttcacgaaattcaacggtcgtagcaactttgggtgcatggatctggtcgagtaattcaccaaaatggatttttttaacacgtggtgtcgtaattgccacacgatgagtcagaattgatgacagagttgttgctgcctgtgacatggaaatattaccaacttcaccgatcaggtctttgaccccttggcgatctaacccctccaataattcttcatcatctgattgcgcagcttcttgagcatcactgccattcatcaaagcatctatttgttcttgtgttaaactctccgtcattcttcttccccctcgatcttgctcaataactcaattgcgaattgtccattctttttccctggtttgacccagtaaaacggtcggtcttcaatgtacgtatctaacggactggagattttagagtccagcttgatgacgtcacctggttctaatttcaagaaatcagccaagtccatttgggtgttgcccaaaacgacttccattggcagatctattgcgtttaacccgtgttttaattcgctttggtcatcttcacttaattcctggcttgagtcgaaccaattatgcaaactcaatttatctaggataccttcgaatgaaacataaggaatacacaagttaataaatgttgaaactccgaaaagctgtactgtgaaagtagctaatacaactggttcattaggtgataaggactgtagtaattgtggatttgtttctagagattcaagctcaacatcaagtgtcaggacttctttccaaactgattgcaaaattttagagaattcacccataacctcatctaataatgttaattcgatatctgtaaaaccatttttatccaaaggcggttgattttttcggttactctccaaatcagcaccaccacacaacaattcgactaaagtcatacatagttggggattgatttcgatcatgtgtgatcctttaaggggagctgctttaaacattccgatcaaagtcacacgtgggattgaatgaatgaattcgtcataactgatctgctcgatcgatgctaattgcatatccaagttagtccgcaagatatttgaaagaacattgccgctcatcttagcgaagtcttcaaaaatcatgtgtaaggtatttatatattctttagatagccgtgtcggccttctaaaatcgtatggcttcgcttgtgattcgtcattttgctcttcatcgatcacttcttcgtctaattcgcccgaatcataggcatttaaaagtgaatcgatttcctgctgtgataacacctgatccacaaagacacttcctctcgctcattagttcattccacaattaaaaaatcttatcattaacgtcgatcacatcagcaatcgtttgttcacccaagtctaccacaccggtaaaataaagggcggcttgatcttcacttagttgaatatcatcaggatcaacatccatcacttcgatcacttcatcgatcaataatccacgacgttcatcatcttttttcattatcataatatttcggtttgtttttgattccggcagtcctactaactgtgccaagctgatcaccgtcaacactgtgcctcgcaaatttatcaagcccttgacccaaagcggagcaagcgggactttggtaatttgaaccgtatcaacaacttcttctacagtttcggcagctatcaaataatgttgctgattcattttaaacaaaatcatctgcattaaaacacactccctttcttaattaaattcagtcaatagaactttaattaagacaatgccttatctaaggctttgatcacccgatcagtatcaaaaggtttgacgataaaatcgactgctccagctctgatagcatccatgaccattccttgttggcccatcgcactgcacattacaacttttgcactgctatcaaattccttgatcattttcacggcctggatcccatccacatccggcatggtaatatccattgttaccaagtccggtttctcagactgataaaggtcgaaggcttcttgcccattttgcgcttctccagcgacctcatagccgttcttttctaaaatatcctttaatttcattctcataaaaacagcgtcatcgacgatcaaaactttatttgccacgcgacattctcctctcaaactccaagtgattttatcattttgtcaattacacccaactctgggatgaagtatagtgaagcttccaagtaattagaatcataagtaaattcatttctgatcaccatgatctcatcaccaaactgttcaaattccatatatgcactactaatcacggcaccaaacatatcaaacgaacttaccggaacttctggttttaatttcttttccagcatcccgccgatcgatgttaaaaatgaacttgaaacaatgttagtcaattcactaactgcagaaaccttaatttcttcggtcacaccttgatctgttcccatcatcaaacttgagatctctttagcggccgggtccgtaataacaaatagcatcgcaccctttaagtcaccatggatgctgcttaaaacggcataaacttcctggtcatcggccataacttgctggtaaagctcgtcataacttaagatattgacttctggaacacgcatcctgatcacactgccaaccatttgtgatattgttgtagctgctttgccgccgccaatattcataacttcttttaacgcatctaattgtatgtttgaatatgccatcttaacccacctgtgcgtctttacagatcgtattgacgtccaagatcaatgcgatcgagccgttgccaaggatcgtcgcgccttggaatcttttgattttttgcaacatcggatcaatcttcttgattacgatttcttgctgtccgatcaattcatcaactacgatcccaaagtctttattatcacccttgatcaagatcatatatttctttccctgatccttttcagggatattcaaaatgttggcagtccggatcactggtgtcaatcctgtctgtaaaggatagacttcctgactagcagtttgtaaaatattatcttcatggatcatttcgacccgttcaacaacatctaacgggatagcaaatgtttcttcgcctagtttgaccatcagtgcctgaataatagacaaggtcaacggtaatttgataactgttttcgtacccacattgactttactgtcaacttccaatgaaccgcccagttcgttgattttagcttgaacagcatccaagccgaccccacgtcctgaaatgttagtgatctttttagccgttgaaaagccaggattaaagactaacatttgcagctctttatcactcataccggtcgtatcgattccacgctcttcagcggtaattttaaggacttgtggatcaaggcctttaccatcatcgctcaaagtgatcatgaccttatttccttcttgataagccgataattttatctttccttcttccggtttgccaagtttctttctgttttcagcatcctcgatcccatggtcggctgaatttctaactaaatggatcaagggctcactgagttcggtaaccacagttttatctaattcagtttcttcgccctcaatttcaagagtcatctttttatttaactggttggaaagatcgcgaaccatccgtggaaaacgactaaagacaacgctgacttgctgcatccgaattttcaaaaccaaatcctgcagttcagatgtcaagcgtgaaacctgttctaaagattcatgcacttcttctaaattttggcgactattggcatcttctagttgattgcgataaacgaccaactcagatacaacattcaaaaaggtatccaaccgagaaagatcaactctgatcgactgatttttggcatttttttgatgcgaagtgctcttcttagacggggcttttgctttcttaggttcaggagcagcgctttttttctcagtagtattttctttgtcaacagctggttgtgcgtctttttgtggttcttcagcggctgccttttgagttttctcatcgaattctgccgtcaaaacttcagcgatctcactactagattcaatgatcttcttaatgtcatcttgattactttcagttaggatcaacaatttgaaatctgtatcaaaattgccttcttccagctggtcaggagccggttcagtgtgaataatatctccttcactgtcgagcttatcgatgactaagaatgctcgtgggcctttcagcattgactctggatcgattcgaactgccgcactgatcacattaagatgttgtgttttagcctgttcgatcgctgataagtcagcttcttctaaagtttcaaatttcagttcgagctgactatcttctggagctttcttctcatctacatttttatcagcggtttttgtttggccgccatctaattcattttcaactttatctaattcattccataattctgtgatctgatcttcgctttgttcttcttcatctcgcaagccgtctagaagttcggtcaatttatctaagcaccgaaaaatcagagaaatatgatcacttgttaccttcaacttgcctgatttgaaaagatcaaaaatatcttccattttatgagtcaacttgctcatgacagtatatcccatagttgctgacattccttttagggtatgtgcagctctaaaaatttcattgatcaaatcgatattgtctggttctttttcaagttctagaatattatcatttagttgtgttaaattatcttcgctttcttcgaaaaagatatcgcgataaacactattatcgtcagccatcaatgatccccccattcaaattatttacacctaagcacgaatggtctgtgcttattgttaaagtccgctaatgctcgacttttaaccggctcactccaccttgttttcttagtcaggttgcttgagacagaaagctccgcctatccaacattagttccacatcgcaaaatacgcaatctgaatctagtgtccgatagtgctcactttctcccgtctcactcaccttgtttctcatatataaacgactctattttctttaaccccagcttttctgcgctgttaagtgtttctgttgctcccgtgaacaatattccacctggtaccagcgcctcacttattttttgataaactcgatcgcgtgccatgggtttgaaataaatcgttacattgcgacaaattatcgcatgaaaacctgattcatactggtcagccaataaatcatgtttcttgaacgaaactcgttgtttgacggctggccctatttgatactggtctggtcctaatgacttaaaatatcgtctaacatcagtatcagaaacattttttaactcatttgtcgaatactgacctaaacgtgctttctttaaaatgtcatcatcaatatccgttgctagaacattgcccataagatgatttttttctaagatcatcgctaaggtgtatggttcggcgccggtcgaacaagccgcactccatagtttcaaattattaaattgtggagcaactttttctaacaaacatttttcaaaattactaaatatttcttgattgcggtaaaattcagtcacattaattgtcaaatgctcgataaactccgctcgtttgattggatctttgtccaaaaggtgttcatattcatgcaacgagttgaccccgtttttatccataatatttttgatcctgcgttgcatttgtctttctttataatcatcgagatggatatgatatttctgctccacccacctattaaaatcagtaaaattttcttccaacattttaatttcacccaacgatcgtctgtagtattttcccgatctcatgcaaacttacaacttcatcgacaacttgagcttcaattgcagatcttggcattccaaaaacggtacaagattcctgatcttcagctattacataaccgccttcatccatgattgtttgcaatcctgccgttccatcatgccccattccagtcaggataaaagctgttaaattagcaccataatgagcagccgccgtttcaaacaagtaatcaacggctggccttgtcccatgcatcttcggacgttgatctaacttgagccggtcaccttggatcgtcatgtgataattaccaggacacaagtagatctgatttttgaccagcatattatcactagcctcaacgactgtagcgccgctttcttcatttaaacgctcagaaaacgtgcgggtaaatcccgctggcatatgttgtacgataaaaacaggaatgtttgtatgactcacacctttaataatttctaatagtgcttttggtccacccgttgatgagccgatcacaacggcttggggcctgatgttacgctttttatgtgctccgttgggtttggctttatgattggcagcaactggcggtttactagaacgtccgcaaatatttttgatctttgcatacagttctctgacccactcgtcttgaatttccatcaggttcacaggtttttcgataaaatcggccgcaccatattctagagctttgatggttactgcctgatcactgactgcacttagcattatgaccgggatagaataatcctttttgatctgtctaagggcgctcaagccatccataacaggcatttcaatatccattaaaattaagtcaaaatcattatctgcatcaaggatgtccaaacaatttttaccgtttcgtgcaattcgaaccgttgaaacactgggcattttattcaatatatccgagatcactttgcgcataaatgcagagtcatcaaccatcaaaatcctattcataaggtataagaatcctttcacatctttacttttctctcttaaacaacattctcaagtcatcaatgagcaaattttcgttaattaaaaaacagtacatagtttttaaatgtatctattttcctgtctcacgaccctgatcaaggtcgaaaaatcgtttaaatcgacgaccatggtccttccgctgctgccgcccgtatcttggccaactaacgggatctgcaggcttgccaactgatttaaaacagcgtcaacatttctctgaccaatattagctgtcgtgaggttgtttttaaatccaaacatatttgcaccaccagagatcttagcttgaaatttagctcgtggtgctttttgcttaagttctttgaccatcaggggtaacgccgtattggcatacttagccaagttcaaacctgaagtcccgttcttttcaaacggtttactatcagggagcataatatgactcaatccaccgatttttgaaactggatcataaacgatcgttccaatacaagaacctagccccacggtcattattttattaggcgcgtatgaaattttataatcagagattcctaccctggtttcgttagtgttctgcagcatcatccgtattctcttctttttctgaattttcagtaatggaatctacggatgaaatgatctcctcttcttgtgaagagttgaaaagataatctaagttcaactcgatcactacttcatcgcccatcttcaaaaattgactgatatacgggcgcttcagtgatgatctgtccaaatctttttcataatccgtctcagtcagcgacatgatccctacgatctcctcgacaaagatccccatcgtccgttcgctccaatgtgccaagatcaccttatagtccagcgttgcaggcgataattcgccgtaaagccgcttactaagatcaacgattggcaacatctgttcttgatattcatacacacctaatacatagtctggcaattccggcaacgagataaacttttcagtttcgatcactcgtttaaccatttcaactggcaaagcaaaaacttgcttatgacttttaaaaacaacatattgtcccatttttgtacccctctttaacttctacaactaagaattgacgctgctagttttttaatttgaaactgccgatttgcaaacgtctgatctcatcagcttgttgaagctgttcgacacttttttcgagttcttcgatcaaggaataaaaatcatccaagttagccgatacttcctgtgtacttgcagaagtttcagcgatctgtgaatccatttgctgaatagaattattgactgcatcttttttatctttgatctcatctgcatgtgaactaacatcggttaggccatcgctcaactgcgtgacatcctcggtgatttgttcgctagccttcagtacaccagaaatattcatctgctgttgctgactgcccttgtatgatgcatccagatcaacagtcattttcttagacttagcacggatcgattcgatcagttctctaatattagtggttgatttgccggattgttctgccagatcacggacttcctcagcaacgattgcaaagcctttacctgcctcgcctgcacgagccgcctctattgaagcattcaaagccaacaaattagtctgttctgaaatatcattgatcaactgcacgatattgccaatactttgaatatcttgattcatcgccgtcatttcagaaacaatcttcttttgactttctgtttcttggttccaagaccgtgaaacttggcgcatcatttccatgttttgaatattactttgctttgattcgtcagcatagctattcattttttcaattttctggcgtatctcttcaatttggtcaccaaaaacattcatttgagcaactgtactttgagaagctgttgcttgctgtccagcattagtagcaatagtccccatcgcttgacggacaccatcgatcgaacttttagcgtgcgtcgattttccacttagatcgttgaccattgtttccgactgctcagtttcttccttgatcccagttaataaagctgaaaatgcattggctaaaccaagcaactggtcacgagttttaataaacattgggctttggccgggaactttgccgatctcgtcgatctgactgaaatctccctctaccatcttaccgacctgaacagaaagtttttttaatccgccggcttctcctcctgttactgccgtatttttatgaccaaatagtacatacaagagatgcaaagcgactacaatgaccgcgagtatccaaaaccttctcatctccgctgtctgtgccgaacttaaaacaaaagcccgaaaaacaattaaaacaatgactgtccctaaaactggcaagaaagctacttcggagttagcttttttagccgtcttcttacgtttttccatttgttttccttccccatataaaagatttggtatctgtcataatactcacttaagcaaaacgacactccaatctgttatatcggttaaaattttatttttttaaccgtttaccaaacatagacatcttttggatcagaaaatcttgaatatccaccgtctggatcatctcggatcagttctccattttttagttccaaagttcgatgacgcaaagaattaaccatggtactgtcatgtgttgctaaaatgatcgttgtccccatctgattcaggcgaaagaaaatttgcatgatctctttggccgacttaacgtctaaattagcagtaggttcgtccgcgataataactggcggatcattcaataacgcacgagcgatcgcaattttcttttgttgcccgactgaaagttcctgaggcaaccgctcaataaatagcatcatttcgacactggtcaatacctctgccatccgctcttcccacttttcagtggggatctctagcgctgacatacaggtttccatattttctttgatcgtcaatcgcggtaaaaaaaggtctttttgcgaaacgatccccaattgacggcgtagtttgtatatctgttcatttctcaaatattcaatttcaatattgccgatccgggctataccagaatcaatggagcgttgagcacttaagatctcaagtaaagttgttttcccagccccacttggaccaactacataaacaaattcaccttgttcgatcacgcatgaaatatttttatttgcccaaacattgccatatttttttgttacatttttaagttcgatcaattttttctcctaaatcagtcggtaaagtggttgatggtctccatcatttcatctgtagatgaagcagcgcgggcattcatttggtaagacctctgtgctgttaataattctgtcatttgagtagccagatctacattggaactttcaagagttccttgcatcacactactacctgccccagcggctctaaaaccgccattggctaaatacaagttatcaccaactgacaccaatgaatgtgcgttgtttggttcaaataaacgtaaagaccctaaaacctgatcaccggatctgatcgttccgtctgaagaaactttcaagtcccctgctggccaattttgttctggcacccgcgcgtcaactgcaacccgatagccgttgctggcgatcaaaccaccgttagcatcacgatgaaagtctcctgccttagtcaagtatgtattaccatcgggaccaatgatcccaaaaaaagcattgccgttaatagccatatcaagtgcacgaccggtcgtttcaaattttccgacttgatcatcgactcgtgctcccgcggcatttagaccagtattcgaatcaactcttgcattagaattaccaagtgcaccgtcgctattagttaaattattattcatcagctcattaaatgaattgatgattcccttatagcctactgtgttttcgttagcaatgttatgtgaaacattatccagattattttgcaagccgttcaaacctgttctgttaatggataaaatagaattcaagttcatttttacttactctcctcatttcctacatgatctgttttctcaagcctatactaagtaccatcaagactcactgtacgcctgagaaaaataaccaactatttgatctagatccgacctagttggttgactgccttatccaaggtcgaattagtagctgatagcactttttgttgagcctgaaattggcgcccggtttccattaatgagaccatctcatcagcagtagaaacattagaattttcaagcattccagcttggaccggcaaatcaatttgctgggctccctgcccggtataaagcgttccgccgacattttgaagttgtgcatttgctgggaaagacaccaccatcaaattttgttgtgcttgctgggcatcaactgggccgccatttcgacctatcacttgaaaaccttcttcagtgatcagctgaccggcatcattcactgaaaaatgaccatcacgcgtatacgcgatttgaccatttcccattctaacggcaaaaaagccattgccttgaactgcaaaatccgttgccaagcctgtcggttcaagcgagcctttttgcatgtccagagcactgccctgaatttgattgccccatgtaaaaccgccaatctcatggcgggtttcatttttgggaccagcctggttattatgtaactgtgcctcgttcattgttgcttcaaacaaatttttttgcaggtagccaggtgtcttgatattagcgatgttaccgctaatattttcttgttgagcttgcaaaacattaaaactatgtcttaaagtatcaattcctctaatcatcattttcctccataaatccttttagttttccaactgcacgcccatggatctgtgaaacgcgtgcaatagaaacgtctaagaccaaactaatttctttaagtgtcatttcctgttcgtaatacaaactcaaaactaattgttctctttcagaaagcttgctgatcgccgctgccaactcctgtttcatttctgtttccaacaaatgttcttgtgcatcgcccgtttttttatcacgaaagatctcttgtctgctaggcgattgttctgctgaaaacaagacatcctccaaagagatactagccatataatgcaagctatcataaatatcgttcagctttttctgattgatttggagcttactgcataattctttgtcagtagcttctcgtttcaattcttgctctaattcctgcttagcccgataatagcgagtcaaattgtcaaatttataacgagacaaccgaccgtgactgcggatctcatcaatgatggtcccacggatccgtacataagcataactttcaaatggtactttcttttgtggatcaaatttcttaagtgcatcgatcaagccgatcactccagtattgaagagatcttcgtagtcataatcggagcttttaacagtgatccgagcgatgaccttttcaactaaaggcaaatatttgataacttgatcttccatattcatctcatacaagaaaaaagctcctttctgaaaataccgggtgaagtaattgtcttctatccttgttcctgcaaatatgtgttgcaaattggaatgtgacgcttactttggcatagtttgtctcacaaatcagaatgtaacgcgtactctggcatagtttgtgtcacaaatcataatgcaacgcatactctggcatagtttgtgtcataaatcataatgcaacgcatactctggcatagtttgtgtcacaaatcataatgcaacgcatactttggcgtagtttgtgtcgcaaatcgaaatgtgacgctttctctggcatagtttgtgccacaagtcagaatgtgatgcatactctggctatgtttttctcacaagtcagaatgtgatgcatactctggccagctatcttcaacacgccttcccacagagtgccttcctaaaattgcaactgcccgactgcctcgatcccgatttcatttgggatctcatttaacgacaaaattgccaaatctgggaagttaaacgacaacaactttctaaacgcagttctagtctgtggatttgtcaaaaggacaaaggaaatattttccaccagcattttttgattcagctgagtgatcgcatccaacatcttattgaccgtatccggctgcaaaacaggatacgaaccagttgctgtttttttaatactctgtgcaaccatttcttcaattttgggatgcacagtaacggcataaattttgttatcttcaccgacatacttgttggcaattgttcttcttaatgcttggcgaacgtattctgtcagcgtttcggtatctttggtgacggtcccataatctgccagagtttctaagatagttgataaatcattgatcggtaccttttcttccaacaaattctggaggaccttttcaacttctcctaagcgtaaaatatctgggatcaattcatcgatcacaacgttgctttgttgcttaatgccttccaataattgcttaacttcttggcgtcccaaaagttcaggagcatgtgagtaaataacttccttcaaatgagtggcgataacagtcaaaggttcgataactgtgaatccttgcaggtcagccgcttctttatcactttcattgatccacatcgcttctaaatgaaaggctggttccacggcttggatgccattaaacgggatctcatccccagtcggactaaagatcatgtatttatcaggataaatatcacccgtgccgacctcattgcccttgatcttgatagaataattatttgcatccaggtacaagttatctcggatcctcactggactgaccaagatccctaattcatgagcagtttgtttacgtaaagcaatgatccggctcatcaaactattgtcgatcgaactatcgaccagcggtatcagtgcataaccaatttcgatcgctaaagtttcgacttggaaatcggctacatcttcgtcttcttggacatcttttttcttttgtaaagccaaagtctgttttcgttgttgctcttccttaactttcttagcatcctgttgtttgatcaggaagctaacaccaagtagggctaaccccataaccataaagggaataaacggaaaaccggggacaagggataaaaccattaagatccccgctacgatccggaatatttgcggattgcgcaacgcatcttcagcaatatctttaccaaacgtactatcattatcagagcgagtaacaataatacctgaggcaattgagatcaatagtgaagggatcgaactgaccaagccatcaccgatcgacagcttgccaaactgtgataaagcttccattgcgctgagatcacctttcatagtaaagatgatcgttccaccaatcagattgactaaaacaatgacgatccccgcaatggcatcacctttaacgaacttgctggcaccatccatcgaaccataaaaatctgcttcacgttgcaggtcttcccgtcgttttctagcctgcttttcatcgatcaaacccgagttcagatccgaatcgatcgccatctgtttccctggcatagcatccaaggtgaaacgggccgacacttctgaaacacggccggaaccgttagtcacaacgaccaactgcacgatcatgatgatcacgaacaagatgatcccaacaatatagtttttccctgccataacgtcagcaaaggcggcaataacatgtcccccatcaccttgtgttaggatcgcacgagtcgatgacatgtttaaacctaacttgaacatcgttgtgatcaaaagtaaggttggaaaagtagtaaattccaagactgagtgagtaaacatggtgatcaataatatgttcatggcgatcgccatgttgatggttatcaaaaaatccaagactggcagcggaagcggaatgatgatcaaaccaatgatactgaccaccaaaagtgaaacgatcaggtcagctggtctgagtgcattcttcttagctgctttttgcttgtttttcatcagttactctctctcctatcaactcaaatccggttcaactttaaccagacttatattttatacttagcttcttcatccaaccggtagaccaaagcgatcaaatcagcgactggctcaaaaaactcttccggaatgaattctcctgcctcgatcttgagataaattgctcgtgccagcggtttattctcaatgatcggtacatcattttttctggcttcttctttcattttcatggcgacctcatcagctcctttagcaagcagctgtgggactggtgtttctgtcttatcatacttgattgccaacgctaaatgagtcgggttcgccaaaacgactgtcgcatctttaacttgggcgatcgagttccggaccatcgcctgatacttagctttccgctgcgctttgaccttcggatcgccttccatttgtttcatttcttctttgatctcttgtttagtcatcttcaatttcttagtccgactgaaactttgataggcaaaatctgccaaccccaaaaccaacaaaaccaaggcaatctgcatccctagttctttacaaaaattgagaataaaaaacaagatcttggcaggaccaacagaaccagcatttaaaatgtcacgtaacgtagatatgtatttgcgataacacagatatgcgatcagtaagaactttgccagcgtttttcccaggttgactatcgcatccagactaaacatccttttgaaaccacttaaagggttcaaacgtttgaaatcaggctttaatggtttagccgtaaataaaaaaccaatttgcacaaaattccccaaaaaactgatcaaataaccgacgaccaaaaatggtgctgccacgatcaaaaccgttaagatcgcctgcaagccaaccttaggtaggtctgcgtataagacctggtagttatccaactgctcgataaagcctgtcatataaggaaaaaacttgcctaatccaaattgccaagcaggaataaagataaacgaaaaggtcaataaagccaaagcagctgttaagtctggacttctagcaacatttcccttcttgcgcgcatctcttttacgcttaggggtcggtttttcagttttaccatctttatccatgaaataacctttcctttatcagactatgcctgacctaccgaacgcaggaactcgactagatactcatatgactgtgggattatctttcccaacaattccacgacatttggcagcatgatcaaaaagatgatcattcctacagtagatttaagagacaaacttaacatcagcacgttcatttgcggcacagaccgtgacaagatccccaatacaatatcgatcaccatcacagcaatgatcaaaggtgcagcaacattaaaagccatggcaagggtcttactagtcaaaatgaccacacccttaacacttgcattcgtcaaagtggcggttcctaaaggaacaatcgtaaaagatagcatcacagcgcgaaacaattccagatgcaaatttaacatgaagaaaactgccagtgccaaccagtagtacatccgaccaaattgtgaactggaaacttccattgtcctgtcataagcctggcccatcgaaaaaccattttgaaaatcgatcagggaacccgccatgatcacagcttgaaaaaccagttgactaacatagcccatggcaagccccaataaagtctcctttaaagccgccaaagcgaagataaccacactcatcgccttgaccttgccaactaaaggaatggcagcaactaccaaactccccccaacgatcagcttagcagtattaggaaaacttctttgtgataaaatcggcgctgtgaccataaaagaaaatatccggcaaatcaccaaactaactaattgtacttcggccactgacgtcacacccccgagatcaagcggaagatatattccgtgaattcttttagcgttgtgatcataaagtttccagccaagatcagggtcacaaaaattgcgaccaacttagggacaaaactcaaagtttgttcttgaatctgggtcgtagcttgaaagatactaatgaccaaaccaacgaccatcgcaactatcacgattggacctgaaactactaagattctgatcaccgcttcacgcatgaccatcaagactaatgaaacagacattaagctccccctctaactgaaactatgaactaacgattcgactaacaagtaccagccatctaccatcacgaataataataatttaaacggcaatgagatcataaccggcgacagcatgatcatccccatcgccatcagcacactcgagacgaccatatctatgatcaaaaacgggataaatatcaaaaagccaatactaaaggctgtccgcagctcactaataataaaagccggagtaagtgtcgttagcggaactgactccacatttttatagcgatgcttgtctttagaaacatctaagaacaatttgacatctttttttcgagtttcttttcccataaattccttaagcctgacctctgaacggttgaatgcttgtttttcagtgatctcctgccgactataaggttggatcgcttctttatagatatctgtataaacaggcttcatcgtaaacagggtcaaaaacaaagccaagccaagcaaaacttgatttggtgggttttgctgcgttcctaaggcacttctagtaaatgaaaggaccatgatgatccgtgtaaaagatgtcatcatgactaacaacagcgggaccacggataaaatcgtcatcatcacaaacacattaacgatctgcgacgaatttccgctctgtccactattgatcaaatcagtaatgccacgagaaacatcatcgaggccagctgcatgcactgaaactggtcggaacaagcaagccgttaaggacaacccgctcagtattttactttgctttttcgtagtcattacttctttctcttattctgcagcttgatcgtcttttgcttgagaatggccgcaaaatctattttttcactcgcttgatcatctgaactggtaaataattgctcaacctcttcttttgataactcagagatcaccgtactgccttgttctgccaagctcatcaagtaatagcgctcgatgacttgcacgatcccaagtgcggaagtttttgaaactgggattttcttgataactcgaaattgccgatcctgtggagcaacgaatttctgtaagtattttaaaaataagttgatcaaaacgatcacgataattaatccaaccaccattttgatcaacgacaacgttaactccatttgaatactcctcgtatgatttaacttattggatcacaaaatctgtcacataaacttcttgcactattgaactgccaaaatttttattaatagcctctttgacttgttctttgacctcatcgatactttgattatttttcaataaatctgcggccctttttggtttcaaaacacggatcatgctgtcacgcactaaaggcatgtctttttttaatgcttttgcttgatcatcgtcagccactaacaaagagacctttaagcgtaaatattgtggatcagctgcatcatccgttgccaaattaacaataaacattttgacgtttaccagacgctgtcttttagaaatggcagctcctgtttgcactttttcagctttaggttttgcgtcttgactattaaagtacttgccgaaaatgatcgtgccggcagcactagccccaaatgctaaaacgactactaaaacaataagcaatccccatttgatgccacctgctttagtttcagttgtttctacttcttcattcttcttcattgtttccctcgttattcccttcaaaaagattctcaccagaaaaaattcggtgacgatattctatgatcgcttccctaatttcaaacgctgtgtctctaactaccagcgttttcccatcgacaagcgtgattactgtatctggggtttcatcaattcgatagatcaaatctgggttcaaataaaattcttttcctttaaatgaagttaacaaaatcatgaacctgccccctattatttatcctgtacataaaataaaaattttaccttacaggttctttttccccttttgatcaaattgctgcgctcactattctaggacagctcctcaagccaggactttccgtctaaccaacttccacacacaatgctaaaaaacgcattatggcctagaagtccgttagtactcgagtcctacccggcttacctcgctcactatcttaggacagctcctcaacgcaggagtctgcgcctatctagtttaaacatcacggtgccaaaaacgcaccatgatgtctaaacccgatattgctcgtctcctaaccgcgttgtttcgctcactattctaggacagtttctcaacgcaggaatctgcgcctatccagtttaaacatcacggtgccaaaaacgcaccatgatgtctaaacccgatattgctcgtctcctaaccgcgttgtttcgctcactatctctttaggttgatcaattcttgcaacatctcgtctgacgttgtgatactccttgcattggcctgatatgctctgcttgtaacgatcatgtcagagaattcttgcgctaagtcaacgttagaatcttccaatgtccccgctaataaagtgttggtcccatctgtaccaggtactaaattattggcattaccagaatcctgtgatatttcataagtgctgttaccgatcttgcttaagccggctggattactgaacgtagcaatcgacactgtaccgatcacttcatcttccgcgccataacgcgcagtaactttgccatcaggaccgattgaaacgtgaccttcaactaacttttcaccagctgcattttgagctggtactgtaattggagttaacgctccgccttcctgtccgggagcatagcccatcacacgtaaaccatcagcattagtcaagttgccattagcatcgatcttcaaagcaccgttacgtgaataaacctgaccattattaccatctcgctcaaatactaaaaacccgctaccattgatatataagtccaaagcacggccagtcgtgttttgaataccttgacccatgtctgtatcgatcgcaccgacctgaaccccaagtccaacttgcttaccatcaataccgccaacggttgcacgtggtcctgaagcattcgcagttgtctgacttaaaatatctgaaaagttagcacggcttgacttgaagccgatcgtgttcgcattagcaatgttgttggaaataacatccaacctggtttgttgactcttcattcctgaaacacctgaatacaatgaacgtaacatttaaaattcctcctatttgtgtagcatctttttaaattttgctattttttaatcttttggttctctaacttctttgatggcacccatttcatattccgtaccgttgacggtcagcttggcaataccgccagtaaagttgactttatcaactcttccttgcttttcattgccttgttcatcaacaactgtgacattcttgcccattaaattgaaagcttgttgttgctgccctaaaagcaaagaattattcatcattgtcgacatattatttaattcctgtaaggtagcaaattgtgccatttgtgaaatatgatctgtaccactgctattggaatctccatctccggtcatggaagggttagacattgatgtcgctaagatcttcaaaaaatcatccattgaaagtcccaaagcatttttagcagcaccgttttgtgaagtactttttgttatctcactcgaactgccaagactgtttgcttgtacaccgcttaaattgtccatgaaatatattcctcctttgatcacgcatactctgagacgctcaaaccaacaaactgatcgttccgtgcttgatttgttcttcgcctggcaaatgttcttcactgaccacttgtgtcctcgtcttgtgcgaacgtgcaaatcggcgttgctgttcttgctcattttgcatgaaatcaccagctggaccatctcgctgctcgcctaaaagttcagaagtttccgccgtttgtctcacagtttcaacttgtttcaatgttttagtcgttggatcaagctgcagctgctccatgatctgctctaatttatgtgtgattttttgtaacatatcacgtgcagtactattttgaacttcaaattctaggctgactgcctgttcattcgtctttaccgcaactttcatctcacccagattagccggtttcaaattaaaaactatgctctgggtattgcccttactggataacaagcttttctcaactactggagtaagtgctttttgcaaatttctcacgacctgctcgaccggtctagttatcgttgttactttttgccccacattagcttgcgtaactgtcgcgcttttttgttcaactacgcttaccatacacgttctatctgtaagctcactaaaatctatgatttcagctgcttgtttttgtcctgctagcgaagctttcgtaccgatcaagatttttgaactaactgataaaatttccgctgactgttttagcgacgatactgaaagctcgtctgccatcgctgcaacttcaggtgatgttttaatttcttgtttacccagctgccctgctttagaaactaacgggctctcaatgatccttgtaggttgaaccgactcaacttccagatcagtctgctgagcagcttcctgcttgatctttgtgtccgaactcacaaccagatttattgtcgagttagattcttgaatagcctggctttcaccagctgacttagaagttaccatactaacaaagtttgctatctgttccttcaaggtcgcttgctgggttgcagacatttcatccaagtcaattacgctttgtgccggattttcgccaaattgctcggtttgttgtggtgcaacgtcattgtctgcaataatttcggctatcggtcctgccttggcttgctttaagtctagtggaggagcagcatccttaggtaatttttcattttttccggcgttatcattttcttggagcggttcgactgcttctgattggtcatgctcgatctctagtaaaatattttgctttttcaaatgatcgctactgctaactaattccttgagtccttccagcaaatcaggcgatatttggacttttccttgcttgaccaagtcatccaaagaaactgtaccgtttactaactgttggaacgttttcgagtcaatttgcaagacttgctctagctctttttttgtttgcgaatcagtagttttaatatgtttgttaagcatgtctttagaagtctctagtcgatttttagcctttttttgtctgaaacctttatcatcattaaccgcaatttccggcttatcttgtgctaaaaaagcctgaaatttccccgtttgttttttggttggcttggctttagcaacctgcaaaccagcaattttcttacctgtaactaccttttgcatttcattgtcctcctttcaaacccttgctttaacgtcaaggtcaagcgatatttacattttgttgtggccggtgaaaatcatccaactgcttttgttcctcatgggctagctccttttgatattgtgcaagctgctttgttttaagccgctctaatattttccgttgtttctgtgcttcgatcaattcactgcgaatttgctctttttgtgcttgcaaccccaacagttgatcgtgacaaatcatgatctggtcgttaagagcttgaatatagcgtcgtgtgacttgcattctgctaactgaaaattgtggagtttccatcatgctgtctttttcttgcatgacttgatccaattcagtatttttctcgttttccaggcggttgacttcagcaaaatgccccttgacctggtcttcaacttgcaaacgatattccagcactttttgtaatgaaaaattaaattcttccatccctgatctccctacccttctgcagtgatccgaccgtcacctaaaacattattcgaagcaaacaactgctgcaatctctcctctgtatctgtgaaacttgaaaattcatccacggcttgttgcaaaaagtcatcgatcggtttgtgcagctgcacagcatagtcgatcacaggatttgttccgctcttatatgccccgatatctatcaaatctttcgcatcagcgtatgttttcaaattttcacgcaattcactggcatggatattatgttcttgagagaccaacgatttcatcaaacgactgacactaggttgaacatcaactgccggataatgattttgggccgcaatttctcgcgataaaataatgtgcccgtctaagatcccgcgaactgcatcagcaatcggttcgttcatgtcgtcaccttcgaccaagaccgtataaaatgctgtgatcgaacccttgtcagacattccgcttctttccatcaacttgggtaattcggcaaaaaccgaaggagtataaccccgggtagttggcggttccccagttgatagaccaatttcacgttgagccatcgcaaaacgtgtgaccgaatccatcatcaaaacaacttttttgccctgatcacgaaaatactcagcaattgccgtggccgtatatgcacctttcagccgaactaagggcggcatatcagaagtagcacacactacgatcgacttagcataaccttcacccaagtctttttcgataaattctctcacctcacggccacgttcaccgatcaaaccgatcacgatcacatcggcctgacaatacttagcgatcatccccagcaaagtacttttaccgaccccactgccggcaaagatcccgactcgctgtccctcgccaaccgttaataatccatcgattgctcgaataccagtcggcatgattttttcaatgtcttgccgtttaaatggatctggggcttcctgcatcgctggatacccgaccatttcagactggtcaagcttggaacctttcaatggacgtcctaggccatcgaaagtatgtcccagcatttttggcccaaccttgacttcaagtgtcttgccagttgcagccactaggcaacccggcgcgatcccctctagctcatctaatggcatcaataagaccgtttgtttaacgaatccaacaacctccgtcactgtcttttttcccgcttttttcgcatagacctcacagacttcaccgacgaaggcttgcaaaccttcgactttgatcacaagaccaacaacttcgctgactttgccgtataccgaataaaaaggatattttttcgcttggtttaaataatttttaaaggggatctttatctttgtcatttatttacctcataattgttccagaaaaccttgtaattcctttttaatgtcaatatcaactaccgattcgtttgattcgacacgcagctgcaaagcatttaaactatcatcatcaaaaattatgtaacgcagatcaggaatttcttctttgacctgctctaacttagtggtcagtgattcatgataagcggagttagcccagaccatcaatacttcatttggtttttcgagttcgaataataatggactcaaaattgcagtgatcttttctggcgttagttccaactgcgtcttcaaaataatttcggccaactgtactgcaaaagaagtgatctcatcctgtttttctgccaggtactgttttgactctgccagactttgctccacgttatcttgtgcctgcttgactagaggtgccattttttgttgtccttttgtcacagcctcctggtatccatctttttttccctgagcataaccagaatcataggcttcttgcttgatttctgctgccttttgttttgcatctactaacatctcagctttcagctgttttagcttttgctggtaagctgccgtctgatgtgctaatttagcgtcaagagctgttaactgtggatcttgcttttttatttgaggaacaaaatctgctgtctttataccaactttcttaccatgcaggggcattgcctgctgtttcaaaatattattagacaatgctgtcttgacctcctcgaccaatatagatctcgcctctttcgtctaacttccgaataactgcgacaactttttgttgtgcttcttcgacagctgataatctagttggacccataaattcaagatcttctttgatattttcaaccgcatgttgtgacatattaccgaagataaagtctttgatacgatcatcgctgcctttcaaggccagctctaatacatcgtttgtcacatcacgtaatactttttgcacatccaacgcttgcaaagtagtaatatcttcgaaagtaaataggttggcctgaacttcactggccaattctggctgtctgctttccagaccggccaagatcgtcttttcagtactgcggcccgttgaattcaagatatcgaccaatgcgccgacaccaccgatactctcacgttcaccatcaaccacattggaaaacttatcttccataactttttcgatccgctgaatcgtttctggtgaagtggccgaaatcgttgccactcgttcagctacatcagattgcaattcatctggaaattctgacaaaacactggcagccttctcagcctgcatataacacaatatcaaagcaatagtttgtggatgttcttctactagcaaattaactaattgctgctcattagcacgacgggcaatgttaaacggttgttcccgcaactggatcgtgttcaaaacatccagaacttctttggctcgttgcggccctaacgaattaactaaaagatcctttgcgtagtcgatcccaccatccaaaacatattgtctggctgtggcagtgtcgacaaattcatcgatgacagcattcttttcttctggagtcacataatctgtattagctatttcataactgactttttgaatcatactgtcaggtaaaagtttcattacctgggaggacgcttctgaccctaaagagatcattaagatcgccgctttttttactccactcaattgagccatctcttatttcccctcctagtgatgatctttcatccaagctttcagcaattcagctgtaactgctggattagtctgggcataatctttagcctgtttatccttagcttgtctttctttgacttctggtttttcctgcagaggtactgctttttcctcttgttttgcttccggtaacggctcactattcgctgaagaagtaggtccaggttgtggtgaatcatcagttacatcgacatcataatcatcatcgtagtagtcatcatcgtcatcttggcgtttcttgcgaatgatcaaaaaggctgcgataccagcgattgcgatgacaccgatcggaagggcgatgtaccaccacggcacattattcttcaccgtcttagtcttatgaacttttggtgtcgtgtctggaacatctaaagcttgaacagtaactttatcaccacgatccttatcgtaaccgatggctgaacgcacaatacttttgatctgcgcctgctggtccccactaacatctccacgaatagcaacagaggtcgttaatctcttcacagttcccggtgcgctaacttgcttagtcacatcagtatctaattcattattgatcgtccggctatatgaagcgccattatcggtattatcgccagttacgttagagacattatcatcggtttgaccagtctgtgcttgttggatctgttcttggttcccattagcttgaacattttcactccgtaaatttggattgctatatttcgtagtcttgcgttccagtgcgtcaaaattaaggtcagcgttaactgcgacgctgattttgtttccatcagctaatgggcccaaaacacgtgtgatcttcttttcaagttgtttttcaaactgtttttggatctgcatatatttactgttcgcacctgtcagatcatcattgtcattattcccatcagccaatacatttccattactatcaacaactttaacgttttcggctgttaatcccttaacggcacctgtggtcaactcaacgatccctttaactgctgaatttgagatcgtgttgccattcaacgtcaatgcaaccgatgctttggctttttttcctttggcatcatcactaaagacatcatcatcaggcatcgttaacattactttagcttttttgacagcatttaaagaaccgatcgaacgttccagctcaccagtcgttgcccgctgatacatgatcttacggtcttcatcagtggtcatcatgctggtatcatcaaataactcatagccttgtgaactatcgggcagtttgttatcgacggccatatcgatccgatactggtcgacttttgtcttatcagctaagatcgttttaccatcatcttttaacttgtacttgatgtcttgatcttccaaatctttcgtaaccgtcccagcgtctgcgtcacttaaattcgaaaacaaaacggcatactcaactctggtgttcagataatatacgatcccaccagcagcaagtatgctgatcaaaccagctatgatagcaatttttactaaacgatttagattagaccatttgtcttttaagtttccaaaaaagtcctttactttatccacttccaagcccccactacacgactaaaactgcatgttcttaagatcgttataagcttccaaagctttattacgaacttgaactgcagtctgtaaagttaattgactttcagtcatattgatcatgacctgccctaagtcatcttgttttccactgatcatatcggtagtcgactgatccataactttcatgcttgaatttaaaccggataaagcatgatccaaataatcaccgaatgttttaccggcgcctttaactgtctgatcagaattatcgagtccagtaactttgcgcagttgagtagcataattatttaagccgttaataccattgacctgtgccattttatctctcctaattttctgatatttctagtgccttactcaagatctgcttattgacctgactcgaagcaacatttgcttcgtaagatctttgcgattggatcaagtcgatcatctcatccgccaagttaacattcggtaaatgaacataaccattttggtcggcatcggggtcatctggtttataactcaacttctcagtttgatcctgtgcaatgccagtcactcttacaccggaactctgtcgtttgttggcttccatgatatttccattgtctgcttcgacttgacgtaaattttcagcgaattgaactgacttccggcggtacgggccaccttccggcgttcgtgttgtattgacgtttgcaatattagttgatgtcgtatcaagctttaaccgctctaaggctaagccgctggcattgatctgcaatccattaaaaatactcactctgatctcctcttctccaatttagtcttaccattaatgattcaaaacataactcatcatttggtaacgccctttgagttgtgatgtcaacgcgctataattcaaaccattttgtgcctgatttaacatctcaacatctaaatcaacgttattgccattttctttaacagccgtatcattgcgcacgctttcatgcggttcaattgccccgcctgcttgcatatgcattttagatgtagtttttaggtgtgtttcttggtccaaagcattattcaaaacactttcaaactcgattcgtttagctttgaaacccggcgtattgacattagcaatattatttgcgttcaattgtgctctattagaagaaacgtttaaagcttctttcattaagccatatgtattttccaaaattaattacacctattttctttgatttaacactaatattttcaaactttttatatttcaattttcatagtagttgcttgcagccaagatgtcccctttatcaaactttttctatatttttcacagcattataattttagctattaacatactcacaatcaagttaatttttaagttattttcaattattttattaattatttttttaactcgtcgtttgtaaaattaagttagaaataaaaaagccatttgtggtagacttttgaatatccctaatcaaaagagaggtaaccacaaatgacttataaacatcttaccacatgtgaattaacctttatatataacttttggaaataagatattaaagcctatcatgccgctaaagctcttaaacgttccagcgaaaccgtttatcgtgtttaccggtttctagatgctggtaattcaattagtcaatttcaagaaaatcatcgagttaataaaactcattgcggtcgaaaagcaattgaattaccagaagatgaaaccaaatacattaagcagaaactcgcattaggttggacccctgatacgattattgttcgagctgagatacagatcagttgtagtatgagaaccttataccgactttttcaaagaggtgttttcaatgtgaaattgttgccaatgaaaggtaaaaggcatccaaatggttacgttgaacggcgtggtaaagctggccgactcggcagaagtatttatcaacgctatcaggattatcctcattttcaacatgaatttggtcatttagaagcagacaccgtccaaagcaaagcacatcaaggtgcagttatgaccttagttgagcgtctctccaaagttgaaatcattttaaacatccaacaaaaatcggctgaatgcgttaataaacatcttaatcaatggttgtcccaacagccaaaacaccttttcaagtcaattacttttgataatggtaaagaattcactggttggaaagaaatcgcaaataagcatgatattagtacttattttgccgaagttggggctcctaaccagcgtggcttaaacgaaaataataatggactaattagacgagatggtctcaacaagagcatggattttcgcaatttaccaaatgctttagttcaacaagtcagtagccggcgtaatcgtattccaagaaaatcattaaattataaaacaccaattgaggtattcatggaaaacatcacagataaacagctatgttatttctaacttaatttgacatttcaagagactaaaaaaggcgaactatcgcatttatgtatgccatttctgaaccacaaaaattttgaaagcgccttgattgctaatttatatataaatttaaagaatgtctaataaatttgcttgttaatatacaaatttaaaaattagtcatttttttggcattttttacttatattatatttcaaaaattattcttgttgaaataatttttgcgaagaaaatgagattttcttactgaataaccgaattacccacccaattttcatttttcgctattccatattgaaaatgtacttcaactattttcaataataatttgctcagtttatttttttatcactagttccactctcctatttttagcacgccccgctgatgtatcgttagttgctttggggttattttcaccaaaagcttcaattgagacgttgccttccgtcactgccttttgctgcacgaagaaccgcatgactgaaactgctcgagcagcactcaattcccagttacttggatagtctttcgattcttgtggcacattatctgtataaccagcaataatgacctcattttcttttagttgttgaatttttggccccagttcctttaaagctgcagcagaatcggcagtcagatccgcactaccgctgtcaaataaaatattgctatccaaatttaaatgtagtccgtcagacttgagtgaagcttttgtgttttttcccaagttcatctctgcagcagtttcgtttaaactatgagcaatttcttttaattgctgttcttgattctgttgtgaaatactgccctttactccattttcttgtttgatcgctgcttttttagttttagggtccggtgcctgactatctttttctttattagttactgatggtgaatcaagttcgattgcgtttgatccaccgactgccgcacttttatgattttgttgctctggtgacaaagccatgatcgacccaaactctgaactgattttttggaacttactatcatcgaccttggctgaagcaaacatcacaataaacagggcaagtagcaatgttaacatgtcagaataagggagcatccaggcttcactatcactatcattttttttctttttcttacgcatgcctgtcccactttctttccaatctactcatttttttcaatgtcagttcgtctggtttcactgatcatactttcaaggttcttttccattgttttcgctgaaactccttcttcgatcgccaatgtccctgccatgatcagttctaaattttgaatttcttgttctgatttacgttgcagtcttttagcaaaaggcatgaacactaagtatcccataaaaataccaaataacgtcgcaacaaaggccgatgagatcgactctcccaagacaccaacgttatctaagtgtccaagtgcaccgatcaagccgatcacggcacccatcacaccaagtgtgggtgaagtactgccggcagtttgcatcatggcagttcctttagcatgccgttcctcgatcgatgagatctcattttccatgatttcttcgatttcttctttatcgatcccgtcgaccaccatctccatgccgcgttttaaaaacgcatctttttctggatctaagttgttaacaggcgtttccaaggccaacaagccttcacgcctggcaacatttgataattctactaatttatcgatcgttgcgcggtaatcatacttttttgcttgaaataatactttgaaaattcctggtaaacgtttgatgtcagccagcggatatgtattgatcagcgctacaatgatccccccaaaaataatcatcatggcctcggggctaaataacatggctaagctagcaccttttaaaatcatcgctgccaccacgatgaccaacgcggcacagataccgatcagtaaaaacaggtccattttttctcctcctcttcactcttccattttatttatcggacaaaattgaaaagatttaaggaaactcattaaaaaaatttccaaaaaaataaaacgactacagaattaacaagcctgtagtcgtttcaactaaatattttgtttttggctaacttcattccaagtttccaataattcttctaacaatttaacaatgggcggcagcttttccttgtctttgctgacattagcggccactaattgttgcgtgataaagttatataaacgatttaagtctgtcgtaatttgactatcaaccgaatgatctaatgaaaatttcagctcatcaacaatgtcttgagctctaagcaattcatgatttgcctttaccatatcattttgattcaatgcaatttcagctaacttgattgctttgatgcccccagagatcaataaactgatcagcttgttaggcgaagcggtcaacacttgattcttcaaataaaaattacgttgcttttgtgcctgttttacatccatttattcaattcccccgccatcaatttaactattttgtaattccagcttgaagtcacggatcaatattctaattcgatcatcgtcccatcggtaattttttggtggtaagtcccacccctggaagacttttgacgatctaaactctttaattgctgcaacacttttttcttctctttcgccgttacttgcatcagactctgatattcagacattacttgttgtaaaaccactttttgctgcgctgacaagtttgactcagtttcctgcaattgagtcaataattgatcattggcttgtagtaaagctagaatggaagcagttgtttggtcccagtctttcatattttgctttaacttcgttaatatttgttcaacttctcgtttttccaaacttctgctcctcttttatgatcgttattattgttgatctacacccaactggctttgcatgtattgcatttgtgaatcagcttgcatcatgatcgagtctaactgggtaaactgtgcaatatattgttcccgtttatcggccaaacgcgcggtgaagtcatcgatctgcgagttcaagtctttgaccatcttatcaatgctatcgcttttattagtaatgattccctttttagtagcatcgttgctaataaattcattgaccaaactatttaatttagcagtatagcccgtgtccgtactttcgtcgaagctgtcctcaccttgaacatagaaaaagtcatggactttttccggtgaatcagcaagttgtgacttaaacttgtcttcatcaaggctcaaaacaccatccttgtcaacagaaaagcccatatcgaagggactcagactagcgccattgtctttatcggcttgtgtgatcatatttctcaaagatgactgtagccgttgcagagtcgaatcgccaaccagcttaccttgaacattagtcgaagaactttccgctgtggaagctgacggattgcccacatccaggtcacttttgatcaaactcattaagttattgtattgtgttacaaaatcagtagcggccttgactgtttttgaatcatcattcttcaaggataaagtgacggcatcttcaggcttgatctcttttttcaaggtgatcgtcgcaccatcgatcgcatcagagatcacgttactatcactttccatgtcaatgccgtctaggctatacttggcagcctgacccagatcagctgaagtatttaaccctaaggcagctaaagtagctgtattctttgtttgatccagtgttgtttctttggcacctgatttgttattcgtcaaaactaggcgcttgttgatcactactgccgaaacaccaatattttttgattctttattgatcttatcagcaatatcgagtagtgagtccttctctgtgatatcaatatcaacagtttctgggctatcgtcagttttttctccttgataagcaaaagtcagtttaccgttcaagttaagatcagtgctattcgtctctgctgcgctgacctggctaccagtcaacttagtttgcttagctaattgactgaccaacaactcaaaatcgccaccatttttggcgtcagaatttcctgagatcgttgctaggtcttcattcgaacttttagcaattttagaataataactgtcattattctgcaaggctttaagcttagtttgaaaattacttaaagctgatgaaatttcactccaggcagacttttcctggttatattttgtaaccttattttgtaacagcgttttaccgccagattcagcctcaatcaactgatcaacaacatccgttgtgatcccagagtactggcccaaaaagctgagccctgcattgggtgctgaggtagcacttgtaatatcagccatttacgtcactatcctttcttatcgaccgcaattcccatctgatcccagatttttcccaaaacatcaagcattttatgagaagggatctcctttaacactttgccgctttgcatatccaccatttcaacgtactgccgtccagtccgctgatgaatttcgaatttcattttaaaatcgcgacccagtaactttttattcaatgtatcaactgctttttgcagttcttgcgggtctacgactacattatcggctgaatcctcaacttctttaacgtttttaccatcatttaactgaaaaagtttacccaaatatttttcctgatctttacgaatgaatgattcatccattaatgaagtatccatttcataactatcagtcgcaactttctggattttattaatagccggcgtggggtcgactggtggaatattattgatctgcatgttacctgtcccttctttccgtgtcttacatatattcactccaatatttctagttaaattctcttttgatttagtcaggctgcgcgagtcaacttctttcggcttatctaagcaacagacttcgatgataagaacgtttcgaaatcagctgttccgacaatgcttggaagtccccgatatgccttcaccttgtttttagtcaggttacgaaatgcaaaagcttgcgcttaactaacttcaacaacaagtcgctaaagacatgacttattgttaaagtcccttaatgctcggcttcataccgcattttctccaccttgtttttcttagtcaggttacgtgagacagaaagctctgcctatccaaccttagcttcacatcgcaaaatacgtgatttgaagctaaggtccgatagtgctcactttctcccgtctcactccaccttgttattaaaaaaaccgaccgccgaataaacgacgatcggcctgtgccaataatattttgttagccctgaagtaatgacaagacactgtttggcattgcgttagcctgtgccaacattgatgttgcggcttgtgaaagaatattggacttcgtaaagttcatcatttcttctgccatatcaacgtcttcgatccgtgagttagcttcagaaagattttctgttgttgttcccaggttgttaattgtatggttcaatccattttgtgcggcacccagatcagcacgttgtcctgaaactgtttcgatagcagctttgatatgcgcaattgagtctctagcattggtagcattactcaagtcaacacctttacctggaacagctggaattatatgtccaggatctgtatcattttcaggtgttccaggagtcaaatcatcaccaacgcccaaagcatcagcatccattttcccaattttgacttcagcagtttggtctttacttgcaccaacttggaaagtaaatttttgattatcattattcaacaacttctgggtgttaaattccgtgttgttagaaatatcagtaatgttctttttcaaagcggtaacttctttagtgatcttaccacgatcttcgttagtcaaagtatcgttagatgcttgcactgccaaatcattcatccggctcaaaatgctatgagtttcactcaaagctccttcagctgtttggatcaaagaaataccatcttgagcattacgtttagcctgcttcaaaccaccgatctgtgctttcattttttctgaaatagccaaacctgcagcatcgtcgccagctttgttgatccgcttgccggatgaaagttttgccaaagaatcactctttgatgcattggctgcagataaacgtgaatatgtgttcaatgcagctacgttagtattaattctcattgtttgttcccccgaatattttgtattttgttgcttacacttattactatcggaatttattttaaatgtttaagtatgaaattaaacataattttgtttttttgtttaaaaaactgtccactccatacaagaagggacagctaaggtcaacctgtttatctagacagacttacattacaattcaaattattagccttgaagtaatgacaagacactgtttggcattgcattagcctgtgccaacattgatgttgcggcttgtgaaagaatattggacttcgtaaagttcatcatttcttctgccatatcaacgtcttcgatccgtgagttagcttcagaaagattttctgttgttgtacccaggttgttaattgtatggttcaatccattttgtgcggcacccagatcagcacgttgtcctgaaactgtttcgatagcagctttgatatgcgcaattgagtctctagcattggcagcagtactcaagtcaacgcccttgcctggatcttctttcgtaccagccccagcatcccaaacatcaccaacttctaatgtctcagcatccattttcccaattttgacttcagcagtttggtctttacttgcaccaacttggaaagtaaatgtttgattatccttattcaacaacttctgggtgttaaattccgtgttgttagaaatatcagtaatgttctttttcaaagcggtaacttctttagtgatcttaccacgatcttcgtcagtcaaagtatcgttagatgcttgcactgccaaatcattcatccggctcaaaatgctatgagtttcactcaaagctccttcagctgtttggatcaaagaaataccatcttgagcattacgtttagcctgcttcaaaccaccgatctgtgctttcattttttctgaaatagccaaacctgcagcatcgtcgccagctttgttgatccgcttgccggatgaaagttttgccaaagaatcactctttgatgcattggctgcagataaacgtgaatatgtgttcaatgcagctacgttagtattaattctcattgtttgttcccccgaatattttgtattttgttgcttacaaatatatatatcggttcagttttaaattgtttaagtcattttagaaacttttttagaaaaacgagttttaatctcagatacccattttcagcgaaaaaaagagccacatcttttatgatgtgactccgttcttgctatgaaatcaattggttctataatatttggtactgatagataaaaacttctatcagtaccaattttgttttatgataaaaaaatagagatgaagtccgcacttcatctccgaaaaacaatccctacactgaaaggaatgtcctacatggcgaattgtacactagatcttctcggaattaaagactcacgtttgcggtttgatcccaaatataaaaatgaggcaacaacttatgatttttacaaacaccaaaaagtgcgttttattcatctgctgcaatcttattcttgttcttgccccgtttgttgcaaaaaaatgaaacgtaacggctttaaaaccgttaaaatgattggcttaccttcaggtggtctgaccaatattttctcgatccgtaaacaaaaatatctatgcccgagttcaggtacatgtcctcaaactatcacaaaattagcggagatcaaggatgtcagagccaacaatcaaatctcacaagccgttaaataccaagcagtttctaaattaggtcagaatatctcacaaaaagacattgccgctgacttcggcatttctggcatgaccgtgatgcgctttgcgcaagaagtctctacttacttagaaccaaattatcattatttgccgcaaaatatcgcttttgatgattttaaatcaggcaatttttctgcaagcggcatgagtatcattgttatggatattgcgactcaccgcactttagacattgtcaggtcacggcagaatacatatttgcgcagctattttctgcaatatgaccgtcaagctcgttgggctgttcagactgttacagttgatctttatgcgccataccgttcttttattcatgaaacttttcccaatgcgatcattattgccgaccgtttccacgtcataactcaggcctatcgtgccttgaatcaagttcggatccaagctatgaaacaaggcggacacggttcacacgtttcccgtgctctgaaacattattggaagctcttgaccaaagacgccgcgcgtctcgattttaaacactatcacaaaagcagaaattttcgaaacagccagttgtgtgaacaagatatcgtggcacgtttattagacatgtctgccgacttgcgtttagcttacaattactatcaaacacttttacaagccatgcatcaagcgaatccagaactgttagaggaactgacccaatcagctgcgggaatgcctgcacccattaagcagaccaaccggactttacgtaagcatctgcaggagatcaaaaacagttttgaaagtgccttttccaatggaccagtcgaagggaccaataacaaaataaaaaccattaagaaaactgcctatggcttcagaaactttgcgaatttccgtctgcgtgttctagtggaattaaagaatagttacgtgagtttgaactttaataatcagataaaaaaagccgcccgttccattcaggaacaagcagcttaaacaagctagaccaattacttttcaattttaataatttatttcatcagtaccacttgataaagaaccaatcaatttaataccagtgattcttgacccaatgtttctgtgcgttagtccagctgccgtatctttgttggacatattgagccgcaactttttcttgattggcaggtgaaaaatcaccatgcaaataattttgatccagctgatatttgccaatatagcgtccatttcgagcattatagttattgctcgactcatgctgaataatataatcacgtgcacttttttctgccccagccaatgttggctctaaactgttgctagaactggcagaagcgttctcatcaaggtcaacattcgctagtgacgctactgttccagcatcattgaccatagaggtcggttgcgcagccgcacttatttgtgctcttccaggaatagttaagttctgtccggctagaataaaatccggatcgtttaactggttagcctgagcaacagcttgtgtagtggtgtgatatttctctgccaactcagagacagtatcgccctttttgattttgatcgtttgttgtgctgtttctaaagcattcgaaaactcagctgcttgctgcgaattagtcgcctgtgttgcggcttgcatcgacccattattatgaacttgcaggtcattattaactaaattcatttttaaaacccgtttccttctttaattactatcacgattcctaattatatagtgttttaaaatattttacagtatctttttaatatcgatcgaattaatttgcttttcccagcaattatattgaatcacatttggtttgtcgaaactttgttcagttttcaaagatctactgtgttgaaacagctttttaagtatatcacacaacttatcgtctgtcaacaactatttttaattaattattacttagaagttataactccttaagcaacatataatatgttatcatgttttcaattaaataacaagtgtttttcaaaactttttatttaattgacgatactgcttatcactaatcagctcgcttttgacaactttattagtataccaacttgcaacccgtgatgcaaggattttctgtaaataaataataattatcttataacaataaaaaaaggcccttagctatactaggggccttcgtttttctactattaaacgtagaggtttttaacttgtttttgtaattccggatgtgctaagaactcatcatagttcgtttcagcacgttcgacaacaccgttcgctgatacttcaatgatatgatctgcaattgtttgaataaactgatgatcatgcgatgtaaagactaaagcacccttgaaatcgatcaaagcatcattcaatgaagtaattgattccaagtccaaatggttggttggatcatctaatagtaaagtattcgatttttgcaacataatcttcgatagaatacaacgcactttttcgccaccagaaaggacattgatttcttttgtgacttcatctccagagaaaagcatcttgcctaagaaaccacgtaagaaagtattgtcatcttcacccttagcggcaaattgacgtaaccagtctaagatgatgagttgatcatcattgaaggctgagttcgtatctcttggtaagtatgattgttgacttgtcacaccccaggtaactgtcccagtatctggctgcacttcacctgctaagatttgcattaagacagctgtcgcaacgtcatttcgtgaaacgattgctgctttttcgtctggcttaactgaaaagctgatgttatctaacactttaacaccgtcgattgtttttgaaacattctcaacccgtaaaagatcattccccaattcacgttcgaaatcgaacttaatgaatgggtattgacgtgaagagggttggatatcttctaatgtaatcttttctaattgtttcttacgagaagtggcttgttttgattttgaagcattggcactaaaacgcgcgataaaatcttgtaattctttgatttgttcttcttttttagcgttaacgtttgattgtaacttagcggctaacttacttgattctaaccagaagtcgtagttcccaacgaatgtcttgatgcgaccgaagtccacatcacacatcattgtacagacttggtttaagaagtaacggtcatgggaaacaacaatcacgatgttcgggaagtctgctaagaaatcttctaaccattcaactgaggcactgtccaacccattcgttggttcatctaataataggatatcaggtttgccaaagagcgcttgaccaagtaaaaccttaatcttttgcccttccatcaattcactcatcttcacatggtgtaaagattcatcaatccctaaggcttgaagtaattgagcagcttctgattcagcatcccaaccattcatttcagcgaattcagcttctaaatcagcagctttcatcccatcttcttcagtgaaatcagctttagcatatagggcatccttagcttgcatcacttcatacaacttcttatgaccttgaatcacagtctctaacacttcaaattcttcaaaagcgtagtgatcttggttcaaactcgacatccgttcattagggcccattgagatatggcctgatgatggttgtaatttaccttctaataattttagaaaagttgacttacctgcaccattggcaccgatcacgccataacaattcccaggtgtaaacttcaaattaacgtcttcatataacttacgcccagaaagcgttaagctcatttcactaacagttatcacttgattccctcacttttctttcatgactctaaaaagccaaccgtttcatgtgaaacggctggctttctaccattgacaatatatgcttaactctaacatatctaatgactagttatcaaccaggctatttgaccttagcaatcttaccttgttgaatatagacacttagaatcccgatatcggctgggttgaccccaccaatccgactggcttgcgcaagtgtttcgggttgaattttttgtaatttttgacgaccttctgttgcaaggccttcaattgcatcgtaatcgatattggctggaatctttttagcttccattcgttttaacttcgcaattttagctttttccttatcgatgtaacccgcgtatttgatttgaatttcaacttgttccacaacgcggttatcaatgccttcgactgctggaataaattggattaaatcagcatactttacttctggccgttttaagaagtcgctggctaaaacaccatctttaagtggtgcctcacccttagccgctaaaaaggcttggatttctggggttggtttcaagcgaatggttgctaaacgtgctaattcagcttcaacggctgcttttttcacttcatagctgtcaaagcgatcatcattgattaagcctaatgcatgacccttttctgttaagcgtaaatccgcattatcgtgacgaagcatcaaacggtattccgcacgtgaggttaatagccgataaggttccttcgtcccctttgtgaccaagtcatcgattaagaccccgatgtaagcttcactgcggtccaagatgaatgggtcgcggcccgtttgcttcagagcagcgttgatgccggccatcaagccttgaccagccgcttcttcatatcctgaagtgccgttcatttgaccggctgtataaagattttcaaccactttggtttcaagggttggttttagttgccatggttcaacgacatcatattcaatcgcataaccaggacgcatcatttgggcattttctaagccttcaatcgaatgaatcattttgtgttggatttcttctggcattgaggttgagaaatcaccgacgtaatattcttctgtttcgcggccttctggctccaagaaaatttggtgccgaggcttatccgcgaagcggacgattttatcttcaattgaagggcaataacgtggacccaccccttcaattacgccggtaaacattggggcgcggtcgagattgtcgcgaatcacttgatgcgtcgtatcattcgtgtatgtcatccaacaagaaagttggtctttcaaataagcactatcaggtgtttcgaaactaaagtggtttggttccttatcccctggttgttcttccgtctttgaaaagtcgatcgtggtgccgtccacgcgtggtggggtccccgttttaaaacgcgtgaggacaaatccgttgtcttccaaactttcagaaagtttaatagaaggaattgaattattcggaccagatgaataggttaattcgccgataataatcttaccccgagaagctgtcccagccgttaagatcacactatcagcgctgtaacgggcaccagtgttagtgacaatccctttgcagacaccgtcttcaacgatcaatgattcagcaatcccttgacgaagtgttaagtgctccgtcgtttcgatagtccgtttcattgtccggtgataagcgtgcttgtcagcttgggcgcgtaacgcgcggacagctggccctttacctgtattcaacatccgcatttgaatgtatgttttatcaatattgcggcccatttgaccacccaaggcgtcaatttcacggacgacaatccctttagcaggaccacccaatgatgggttacatggcataaaagccaccatgtctaagttaatcgttaatagtaatgtttcgcggcccattcgtgcagcagctaaagccgcttcagaacctgcatggccggcaccaacaacaatcacgtcgtagtgcgctgcgtcatattctcgcatattttgttctcctttaatatggttcaagacctatttacctaaacagaattggctaaagagttccgtaatcaattcatctggtgctgaatccccggtaatctcaccgagcttatcccaacagttggtcatatcaatttgcacaaggtcaactggcatcccagctgcaattccactgatgacttcatctaatgattgttgtgcttggtttaatagaccaatttggcgggcattagtaatcatgaccgtactttgactattttcaatcccaccgaagaagagtttggcgatttgggcttccaaatcggtcaccccttcgcttgttaaaattgaagtttgaattacttcatccgcattcaccaatgtttggagttcatttaagtctaacaagttcggtaaatcggttttatttaaaataatgatccgtttcttatcagtggtggccgtgattaactcgcgatcttcaaccgttagtggttcactttgatttaaaactaataaaatcaggtcagccttggtaattgctgcgcgacttctttcgaccccaatcttttctaccttatcttcggtatcatgaattcctgccgtatcaacaagcttcagcggtaccccacggacgttgacatattcttccaaaacatcacgcgtcgtcccggcaacatccgtcacaatcgccttatcttcatgtaataggtgattcaacaaacttgatttaccaacattgggccgtccgacaatggccgttgctaggccttcacgtaagacttttccttgttgtgccgtttgaagtagttcaccaatccgcgctttcacaagttcggctttttcaagtagaatccgcgtcgtcatttcatcggtatcatattcgggatagtcaatgttgacttcaacttgcgccaatacttctaagatttcttggcgtaaattcttaatcaggtgcgttaaactcccatctaattgatcaacagcaacttgcatcgcccgatcagtcttagcccgaatcagatccatcacagattcagcttgggttaaatcaatccgcccatttaaaaaggctcgtttcgtgaattcacccggttcggccattcgtgcaccatagctcattaataattgtaagatgcggttcgttgcgacaattccgccatgacaattaatctcaatcacatcttcgcgggtaaacgttttgggtgcgcgcatgacagacaccatgacttcatcgactactgcgtcggttttaggatcgataatgtgcccataattaatggtatggctcgccacttgatcaagatctttgccgcgataaacgcgtttaataatggctaaactctcatcccctgaaagacgcacaattgaaattgccccctcaccaggtggtgttgaaatcgccgtaatcgtatcaaattctgtgactgtcgttggcattttaaatgcttcctttccgaaatagctgcataaaaaaagcgcttagcgtccacccctcccgtcattgtgtaaggggtggacaaagcactttcactactttatcgatatttaattagtttcattatacacgatttttttagagcgtcaattcacaacacctaaaatgtgcgcgctaattccaccacaattgaccggcgatcgccttggccttctgaatgagtttgaacatggtgattagttgctaaatgcccatgcacaattttgcgttcaaaagccggcattggttctaaaaagactggtttgccggtcgcaacgacttcacgggctgctttatcggcaaggtggctgacaatcgctgctcttcgctgccgataatcaccaacttctaggataatggtttgcttgcccttcatatgatgatcaaagtaagtctgcgctaaatattggagcgcattaattgtcttaccatgcttaccaatcaacaagccttctttatcggtcttcaaatgataagtcgtactccgatggtcgtgagttacatgaatgctgaccggtgtgccaatttgagccgtgatggcttccaaataggcgcttaactcagcttccgtttccacaccacttttccgcttttgcggcgtactagttaaattgtctgttggcgttggttcaactagctcttgaactggggctggggcgctttgtttaacttggcttggttgttcatttggcgttagccggacaactgctaagcggcgaccaaaaccgagaaacccttttttgccggcttccaatacatcaacggacacttcctcacgcgttagatgcatagcttgcaacccttcatttaccgctgcttgaatatcgctaccttcatatgttggcatttcaaaacctccgatcaatttggtcactccaactagtgtgagcgcccgattctcgtttattataccatgatataccaatttaaaaatagcatgtcattatctgagatagtccgccgtcaaagctaggaattgttgtacatctttagcgatgctatccgcggcagcttgccagaaatccggttgggttaaatcaaccccaagatgtttttgcgctaatgcttcagtcgacatattggccgtatcacgtaatagtgcgatatagtccgcttcaaaatcaggcattgtctgtgccttggcataaatccccatcgaaaaaagatagccaaacgtataagggaagttataaaacggcacgtcatcgaagaagaaatgctgtttgtccgcccagaatagcggatcataatcagtcaacgcatccgcataggcttctttttgagcggctagcatgagtgcttttaaatcagctgttgtttgcaggccattttggcgcgctgtataaaaatgtcgctcgaataaaaaccgtgcgtgaatattcataaacatatcaattgcgttagtaattttctgatccaataaattaatcttcgctgctgggctttgcgctgctttaacagtcgcatcactgacgattagttcagcaaaagtggaagctgtttccgcgacgttcatcgcatagtcttgtcgccaacttggtaaatcattaatcatcattgtatggaacccatgccctaattcatgtgccaaagttgcaacaccattgggggtgccatcaaatgtcataaaaatccgaaaatcatccgtttcaggtaaatcagtcatataaccacctggttgtttgcctggccgatcttcagcttcaatccaacgcttttcaaacgcggtttgtgccaccgaagccatcttgggactgaacgctttaaagttctgcatgataaaatccgctgcttcatcataagaataacgctgcggttgaaaatcacctacaaccactggtgcccaggtatcataccaagcaagctgttctttgcccattaacgctgccttccgatttagaaaatcgacaagcggcgctttattttgactaacgatcgaccacatcgcttctaacgttgcgggttgcatgcgactcgttgccaatggctttttcaaaaagtccgttgtgccatgtgcttgataatccgttaggcggaagccagccaaatgatttaacgtatccgttaataatggtgaataccgatcccaagtctggtaccaattttgaaagacgcgttggcgtaccttgggatctggatcagattcaaatttattctgcgcttgtcccgccgataaagtcgtctcaccatcggggacttgaatttcagcaaccaatgagtcgtaatgatcactccatccagttaaaccatctaacgcgaactggttaattagtttttccgtcgcttcatccaaaagttcagcaccattcgtccgtttttcggttagattaaactgaatcgcttgtaaggcaggtgtcgatacaacggttttaaaatctgcgtctgacattgcgaccaatttttttgtgagtgcgacatcaatctgattcgcatcattttcaagcgcattaatccgccccatcatcggtgcaacttgcggattgcgttcatccgttgattgaatcatattcacgaaactctccgtttgcttgagacccgcttcaatcgcttgtaactgttcagtgatttgcgttagcgttgcaaatgttggctgatctgtcgcaaacgtccagttctggaccgcttctaataagggcgtcatttgtgcagtcaaatccgccaatcgttgcgtcaacgctggtgaatcaatccccccggcaaaaatcggttctaaatcccattgttctgaataggtcatctctttatcctccacttttaaacgattgcacttattatagcgaaatttcgcgcaaagcgcgattaattcaaccagatccactagacattttgataatatctgttaaattaggaatgtaagcagatacatagctgctagaaaggcgatgtttatgatgacgattgaacaagtacccgctaatacaatcgcagatttaaaaacactgttaaaaacgacccaagtgcccgataaaattatggcaatgggacccgaactgatccaatacttaacccatattaaggcgagtcaattatcagacaccgaccatcttgggttcgatttagggagtgccggcattttaacgttaatcgaacaagtcaatacagcctttttcgatcacttccatatgtttgacgatgctgcaccgattgaaccaaagttaacgcgtaaaattctagtgctttatcatctaaaaccgattgatgatcagcacttcctccttcatttgaaacaattagactattaaacagcaaaaaatcgtaaccaaatcggttacgatttttttattcttaaagatttttgaatgattattagtcttgaaattagttatcgattattaccaatcatgatgctactataaaattaagaaaacggtttagaaccaattttaacaatttatctatctgaatttctattttttaatctagcgctatggaggattagccattgaaactatttctttttatattaacaacactcctttatttgctattagattatttaatgctaacctttccacctgtcgaaggtgtggctcagaatgttcccctcatccttttaccattctgttatttttttggatcccgattcttgctgagaaaaacaacgattaaccgccataaaagcgggttacttattggtgccgtttgtgtcgtctgcgctatcgcaattcctcttgtacttgctgcctattacctattctaaaaaagaccaatcataatgaaaattcattatgattggtcttttaattttggaaattaacgtttcttagttgctttcttacgtgctttagcaagtgctttttcacgatcacgcttttctttttccttggcttcgcgttcgcggcgaatcttaaatggattttgaatcaccattgtttgacccactgaaaaggcgttcgttaccacccagtaaattgaaacagcagacgcgatgttcatggccatcacaaaaatcatgattggcatcacccacaacattgcggatgacgcagcattcttcgtgggttgcgacatcattgttagatacgatgttgcaaatgtaaagatcgcagccaagatagccataataaagtaaggatcagctttcccaagttgcatccataagaacgtcccactctttaaagcagctgttcgatagattgcttggtacaaggcaatcaacactggcatttgaaccactagtggtaaacagcccacaactggattgacgcccgcttcagcatatagcttttgcgtttcttcgcgtaacttctgttgtgtctcagcatctttagaagcatatttcttttgaagtgcttgaatttctggtgcaacttcttgttgtttgagcatgctcttactttgccaccaagttaatggcaagataatcacccgaatgatgatggtgaaggccacaattgcccaaccataactgccaccaaagatgtctgctaaccataaaataaagcgggaaaagttataaataacataatgatcccagaagccagtactgctactatcaactggtgatgtactacaccccgctgcgattagcatgaacaagaatagactggccactaataatagccgtttgcgattttttgaactcactgtaatccctcacttattcagaagcagaatctgcttcttcctttaatagctttgctagttttaagacgtgcattaaattctgtttggtttccgccattgttagttggttagcgccacgtcttgcgatcactaaaaagtcgacagtctgtggtaactctggcttcaactccaacaagctctggcgaatgtaacgcttaacctgattacgcatcactgcgttacccacttttttacctacggacaggcccacccgaaaatgcttttgaccaggtttttctaattgataaaccacaaaattgcggttggcaactgaatgacctgcttcaaaaaccgtttggaaatcctgttcttttttgacgcggtacgactttctcataattcactccggcatttcatttaattaattgaggataataaaaaaaaccactgaagcatcagtggcctatgcagataatacttttctgcctttagcacggcgtcttgcaagtaccttgcgaccgttcttagtattcatacgtttcatgaaaccatgaacacgttctttatggcgtttctttggttggaaagttctctttgtagtcattatactggcacctcctaattgactgtgtctattgttttcatatctgagaaacaacgggtgataaataccacctacgacattcactaaaatataatagcatatttctatagaagttaaaacactttccataaaaaaacagaataaatattcttatccacaaaaaataattcattggctttcttgtggataactgattataccgaatcgtccgatttttgtcacgcacagattacttgctgatttatccagaaaatcacagggtgttactatgttatccacaagctattttcaagctgtgcacaaattgataaaaccttttaatagcaagcatcagatacacacacttttttgtggataagtgcgataatcgtttgttgttttctgttttccacagtccccactaaaagttatccccggtcgtgtgttcaagtggataactttttaattcattcctgtggattttgttcttgttgtggaaaacttttttttagaatgctagaatgtagatagtctttctttattgaactttttttcaataaagtggttattttacgtgaggaggacacgctacatgcctgatcttcaggaactttggaactatttgcgggaagaattccaaaatgatttaacacccgtcggttttaatgcttggattaaaaccgccaaaccgcttgcttttagagccaatgaaatactgatcgaagtgccttctcctttacacaaagagtattgggaaagtaacttggccactaaggtcgttgaaggggcctacgaattcgcagagattgaattgacccctatttttctgttacctaccgaagccgagcagcttcaagctgaaaaaccagctgaagaacgcagcctcaccaaagctgaaaccccaacctttttacgtgaaacgcatttaaatagtaaatacacgttcgacacgtttgtgactgggaaaggcaatcagatggcccacgctgcagcactcgttgtttcagaagaacccggtgttttatataatccactttttttatacggtggagttggtttaggtaaaacccatttgatgcaagctatcggtcaccagctgttactctctaaacctgacacaaacgtcaagtatgtgacgagtgaagcttttgccaacgacttcatcaattcgattcaaacgaagaatcaagaaaaattccgccaagaataccgaaacgttgatttattattggtcgatgatattcaattttttgcggataaagaagggactcaggaagagtttttccataccttcaatgatctctacaatgataaaaagcaaattgtcttaacatctgatcgtttacctaatgaaattcctaagctccaagaacgcttagtttcacggtttaaatggggcttgtccgtcgacattacgccgcctgatctggaaactcgaattgctattttacggaacaaagccgacacagaacgcctcgaaatcccagaagatactttgagctacatcgctggtcaaattgattccaacgtccgtgaacttgaaggttcactggttcgggttcaagcttatgcaaccatgcaaaatgctgaaattacaactagtcttgccgccgatgcccttaaaggcttgaaactcaatgggaagtcgagtcaactttcaattgctaagattcaatccgtagtcgctaagtactacagcctttcaatcactgatttaaaagggcgcaagcgcgttaaagaaattgtgctcccacggcaaatcgctatgtacttggcccgcgaaatgaccgacagttctcttcccaaaattggacaagaatttggcggtaaagatcatacaacagttatgcacgctcatgaacgaattagccaagctttaacgagtgatcaaaatctaaaagatgccatcttagatttgaagaataccttaaaaggctaaatataggctgtggataaacgctaaagttatcctaagagttgttctcaacttatccacaagtggaaaactagacactcttttgcttttctatgttatccacaggttccacaggccctactactattacttaaaattcttttataatatatatatctattttccttcggaggtttaacatccatgaaattctcaattaaccgcaacgtgttcatcaaaacccttaatgatgttcaacgtgccatttcagctaaaacaacgattcctattttgacggggcttaaattagtgctttcgcaagaaggcttaaccttaaccggtagtgatgctgatatttcaattgaagcaacccttgctagtaatgatgaaaagaatcaattagtcgttgaagaagcaggtgccattgttttaccagcccgcttctttagtgaaatcgttaaaaaattacctgaagatcaaatgacgattgctgttggtgacaacttccaaacaaccattcgttcaggtaaatcagaatttacaattaatggcttagatgctaatagttatccacatctacctgaaattgcgggacaaaatccgttcagtatcagtactgatgtgcttaaacaattaattcatcaaaccgtcatcgctgtttctaaccaagaaagtcgcccaatcttaacgggggttcatttggttttaaaagatggcgaaatgttagccgtcgcaacggacagtcatcgacttgcacaacgaaaattaaccgtttcagtaccaagtgatgggaactacgatgtcattattcctgggaagagtttaattgaactttcaagaacgttagcagacgaagttgaaaccgttgaaattcggattgctgaaaaccaagtgctctttaaagccggtaacttagccttttattctcggttgttagaaggaaattaccctgacacagcacgtttaattccaacttcttcaagtacacaaatcgaattcaatgcaccggtcttattagctgcgattgaacgggcatcattgttgtctcatgaaagtcggaacaatgttgtccggttgacattgaatacaacggacaacacggcaatcatctacgggaactcaccggacgttgggaatgttgaagaagcccttcaatttgaaaacctaacgggcgaagatctcgaaatttcatttaacccagattatatgaaggatgctttacgttcatttggtcaaacaaccatcgtgattaactttacggcagctttacggccatttacattggtcccaagtgaagatcaagaacactacattcaattaatcacaccagttcggacattttaataatcaaaaaacgccgcatttaaaaatggggcgtttttttttgcgctaaaattaaaataaattcgtttacagcgatttcggataaaacaagtaggataaggttaaagcacttaaaaacgctcagaaagcattttagctgtgtttatttgtttttaaggcaaaaaaagtctataattgtaaggtataacagatcggtattagcgcagtaattaatatcgttaagaatggtgggttgagtatggcacaagaaattaaacttgaagctgagtttgtgacactcgggcaactccttaaagaggccggtgtgattgaaacaggtgggcaagcaaaatggtttttaaaagaaacaacggttttagtgaacggagaacctgatgatcgtcgcggccggaagttatatctggaagacgtcgttgaggtgcccgataacggccagtttgtcattaaacaacaagaaagattgtaggcgactatgtatttaagtgaactccaacttgatcattatcggaattacgagcaagtggacgtccatttctcgccagatatcaatgtcttgattggtgaaaatgcgcagggcaaaacgaacttgctagaagccatctatgtgttggctttggctcgttcgcatcggacgaataatgatcgtgaactgatacaatgggatggcgaattcgcaaagattaccggcttggtacaacggcaaactggccacacaccattagaattggtggtcagtcaaaaaggtaaaaaagcgaaggtcaatcatttagaacaggctaagttatcccaatatatcggtcaattgaatgtcgtcttgtttgcaccggaggatttgaatatcgtgaaaggctcgccagctgtccgacgacgctttatcgatatggaattcggtcaaatgagtgcgaagtacctgtataacatttcgcaatacaagtcgattttgaaacagcggaatcagtatttgaagcaactacaacgacgtcaagctaaagatttagtgtatttaggcgtattgtccgaccagttagccgcttatggcgcggaagtcacggttgctcgccgtgaatttctgcaacagatggagaagtgggcgcagaagttgcatcaagagattaccaaagagcgggaagttttgacgtttaaataccaaagtcagattccagatgagcagttggtacttgatgccgaaggtttataccaacagtttcaaaccctatacgagtcgcaccaaacacgggaagtcgaacagggcacgacattggttggcccgcaccgcgacgacgtgttatttttggttaacggtaaggacgtgcaatcgtttggctctcaaggccaacagcgcacaaccgcgttaagtgttaaattggcggaaattgacctaatgaaggaacaaaccggtgaatatcccgtcctattactggacgatgtgttgtccgagcttgacgatttacgccaaacacacttattgaaaacgttccagaataaggtgcagacgttcttaacgacaactagtcttgaaaatgtcaaaaaagaaattattagtgcgccacgggtgtttaccgtgacaaacggcaccgtgacagtggccgatgcagcagcaaattagtcaaaaaacgatcaaacggaggtttttttcttggcagatgatcaaatgaatcaagagacagaagcacaaatggaagcaaaagaagaacgcgctaaatcttatgatgccagtcaaattcaggtgttagaaggcctagaagccgttcgtaaacgaccagggatgtacattgggacaacgagttcccaagggttgcatcatttggtttgggaaattattgataatgggattgatgaagcactcgctggttttgcaacagaaatcaacgtggttgttgaacccgataatagtattacagttacagatgatgggcgtgggattccagttgggattcaagctaagactggtaagtctgcgctcgaaaccgtctttacaatcttgcatgccggtggaaaattcggcggcggcggatacaaagtatctggtgggttgcatggtgttggggcttcggtcgttaatgccttgtcaacggaattagatgcggttgttactcaaggcggtaaacgctactacatcgatttcaagcgggggaaagtgcaaacgccaatgaagatgattggtgacgcaccagcccatgaacatggtacgaaagttcattttgtccctgatgctgatatctttactgaaacaacggtgtatgatgataaaattttaacaacgcggattcgggaattggccttcttaaacaaaggcttgaagttaacgttcaccgacaaacgggctgaaacacatgaaaaacttgaattccactatgaaggtgggattaagagttacgttgaatatttagacgacaaaaaagagacccttttagacgaaccaatctatgttgaaggtgaacaaaacgggattaccgtggaagttgctttgcaatatacgaatgattatcggacgaacttgatgacctttgccaataacattcatacctacgaaggtgggactcatgaatctggctttaagacggcgctcacgcgggttattaatgactacgcaaccaagcaaaacatcttaaaagccaacgacacgaacctttctggggaagatgtgcgtgaaggcttaacagcggttgtctcggttaaacatccggatcctcaatttgaaggtcaaacgaagacgaaattaggcaatgccgacgcacggacggtgactgatcggatgttctctgatcatttcacgaagttcttgatggaaaacccatcgattgcccgccaaattgtcgacaaaggctcattggctgccaaagcccggttagctgctaaacgcgctcgtgaagtgacacggaagaagaacggtcttgaaatctcaaacttgccaggtaagttggccgataatagtagtaaagatcctgctatttcagaattattcatcgtcgaaggggattccgctgggggttcagcaaaatcaggccgttcacgtttaacgcaagccatcttgccaattcgggggaaaatcctgaatgttgaaaaagctagcatggaaaaaattttggcgaatgatgaaatccggaccttatttacagcaatgggcactggttttggccaaggattcgatgtggctaaagcccgttatcataagttgatcatcatgaccgatgccgatgtcgatggtgcgcatattcggacgttgcttttaacgttgttctaccgttacatgcgaccaatcgtcgaagcgggttacgtgtatatcgcacaaccacctttgtaccgtgttaaacaagggaagatgatgcgctatattgattctgatgaagaattacaagaagtgttagggacgctccaaccaagtcctaaacctgaagtgcaacgttacaaagggttaggggaaatggatgctagccaattatgggaaacaaccatggatcctgaaaaccggcgcatgttgcgggttaacgttgaagatgccgaagaagcggatcaaatttttgaaatgttaatgggcgatcgggttgaacctcgtcggattttcattgaagaaaatgccgtttacatggatccaaagagcatcgatgcatagcgtgttcgccgcttaaacggacacattgaaagactgactgagaggggtttatagattaatggcaaacgaaattggccaagacggtcggattgaaaacgtcaatttatctaagacaatgcgtaaatcattcctggaatatgcaatgagtgtcattgttgcgcgtgccttaccagacgttcgtgatgggttaaaacctgttcaacgtcgaattttatacggaatgaatgaattaggggtcactcccgaaaagccttacaagaaatctgccagaattgttggggatgttatggggaagtaccatccacatggtgattcagcgatttatgaagcaatggtgcggatggcacaagattttagttatcgttacatgttagtggatggtcatgggaatttcggctctgtcgatggtgatggtgctgccgcaatgcggtacaccgaagctcggatgagcaagatggctgtcgaaatgttacgtgatatcaataagaatacaattgattatgtaccgaattatgatgagtcagaacgcgaacccgctgttttaccagcccgtttcccgaacctactcgtcaacggggcgactgggattgccgttgggatgacaaccaatattccaccgcataatttagccgaagtgattagcgcattacacatcttgatggataatccagatgcgacaaccgctgatttgatggatgccttacctggccctgattttccaactggtgggttagtgatgggtaaatctggtattcgccatgcgtatgaatctggtaaagggacaatcacccttcgcgctaaagtggacgttgaggtccaaaagaacggcaaagaacggattattgtcactgaaattccatacatggttaataaggccaagttggtcgaacggattgctgaattagcccgtgacaaacggcttgaagggattaccgatttaaacgatgaatctgatcgtgatgggatgcgcatcgtaatcgatgtgcgtcgggatatgagtgcttcagttgtcttgaataacctgtacaaattgacaccattacaaacctcattctcatttaatatggtggccatcgtgaatggtgcccctaaagtcttgagtttgaaatcaatcttggaacactacttagtgcaccaagaagaagtcattcgtcggcggactgaatttgatttgaagaaggccgaagcgcgggcgcacattttagctgggttacgcattgctttagaccatatcgatgcgattattcagatcattcgtggttcgaatacaggtgatgccgctaaggtcttgttgatggatcgttatgatttatcggataaacaagcgcaagccatcttggatatgcgtttagttcgattaaccggtttggaacgtgataaagtcgaaaatgaatacaataatttgatgactttaattgctgatttgaaagatattttagccaaaccagaacgcattaagaagattatctacgatgaattgcttgaactccaaagtaaattcggtgacaaacgccggacagaattattggtgggtgaagtgcttagtcttgaagacgaagacttaatcgaagaagaagacgttgtgattgcattaacgcataacggctacattaaacgattaccagccagcgaattcaaagttcaaaatcgtggtggtcgtgggattcaagggatgggcgtccatgatgacgacttcatcgaacacttgctttcgacttcgactcatgaagtgctcttattcttcaccaatactgggaaagtttaccgtgccaaagggtatgaaattccagaatatgggcggactgctaagggaattccaatcattaacttattaggcattaattctgatgaacgcgttcagaccgtggttaatgttggtaaagaagtgcaagacgaacaatcactcttctttattacccgcttagggacggtcaaacggacatccgtttctgaattcgccaatatccgtagcaatgggttgaaagcattgaccttgcgggaagaggatgaattaagtaacgtcttgatgactgatgggcaacaaaatatctttatcgggacccataatggttatgctgtgtcatttagtgagacagctgtccgttcgatggggagaaccgctgctggtgtgcgtgggattcggttacgtgaaggcgactatgtggttggctctgacttactgattccgggtcaagaaatccttgttatctctgaaaaagggtacggcaaacggacaccggttgcagattacccaatcaagggtcgtggtgggaaagggattaagactgccaacatcactgaaaagaacggcccattagctgggattgctgccgtcactggagaagaggatattctcttaatcactgatactggcgtcttgattcgtttcaaggtcgctaacgtttcacaaactggccgggccacacttggtgtgcgtttaatccgggtggatgacgaagcgaaggtcgcaacaatggcgaaagtcgaagctgaaccagatgaacctgaaacaccagaagcaacgacggcaccaatagcaccaactgatgacactactgatactggcttagcacaagtcgatgaattactcgcgcgggctgaagccgatcaatcggcatcagatgatcaagattcagaaaattaattaaattaaaaaaataaaaatcgtttctgcgtaaatacacttgtaacaactgttaccaagcgtgttagcagcaacaatttttattttagattgtattttaacggccgttatgatagaattttatcttgtgagtatctgtgatttagacacagggtctaaatcgtgaggctaatttttattagtcagttactccttgttcttacacaggtaagaacctaaagtccataaggaggtgaacagtcatggctcaatcaaaatacgaagttacttacatcatctcaacaacacttgatgaagaaagtaaaacagctcttgtcaaccgttacgacggcatcttaaaagacaacggcgctgaagtgattgattcaaaagactggtcaaaacgtcgtttagcttatgaaatcaacaatcaacacgaaggcatttaccatatcgtaaatgttttagctgataatgatgaagctttaaacgaatttgatcgtctagctaagattgatggctcagtattacgccatatgatcgttaaacgcgaagactaattttgaattgtaattattgaatagaggggagctgacagaatgattaatcgagttgtactcgttggtcggctaacacgcgatgttgacttacgttacacttctagtggtgctgctgttgggactttctcaatcgcagtgaaccgtcaattcacgaatgccaatggtgatcgtgaagcagactttatcaactgtgtcatctggcgtaaatcagcggaaaatttcgctaatttcactaagaaaggctcactagtcggagttgatggccgtctacaaacgagaaattatgaaaaccaacaaggtcaacgtgtatacgtaaccgaagtggtcgttgataacttctcattgttagaatcacggacaacaacggagcaacggcaaggggatggcgcaagccaaaactttaacaacaatcaaagcaatggtagccaacaatctggatttaccagccctcaacaatcgggtaatccatcagctgcaaataacactcaagccgatccatttgcaaataatggtcaagcaattgatatttcagatgatgatttacctttctaaaataaactgttttggaaggaggaactttcaatggctcaacaaagaagaggcggcaaccgtcgtcgtcgtaaggttgatttcatcgctgctaaccacatcgaatatatcgactacaaagacactgatttattgaaacgttttatctcagaacgcggtaagattttacctcgtcgggtatctggtacaagtgctaaaaaccaacgtcgtttgacaattgcaatcaaacgcgcacggattatgggcttattaccattcgttacagaagactaatcagtcaaccaaaagacctgctaaacactgtttagcaggtctttttttgtgcgctttaataggggaacatgggattaaattacgggttcaaagcggtaattgtagggcaattgtgctaaaataaaagtagtattttttaagttttagtaaagaaccacatagactcaatgatagatgaacaagaatcagaatgggatctagaattaaggagtttacatgaaaaataagtttaaacaattaaaattaccacagtttttagatgatactcgcctgcggaccgttgccctgattttgttgggccttacagcggttagtttggtatttgctgcgatgttagattggctaattgctctaattttattcgtgctgctaatcgggacggtcattactgtgctatacgcgatcgaaacggtcactgagaatacagccaagtatgtctcggacttgtcgtaccgcattaagcgcggcgagcaagaggctttaattaagatgccaattgggattttattgtacaacgaatcaggtgagattcaatggacgaatccttatttacagcaatatttcggtaataaagaagttttaggcaaaaagattaagtctgtcgatccagagttggcagaattagtcgcacaaaatgaagatgctaatgaaacaaaaattgttcgttggggcgataatcaattccaaatcattatccaagaaagcattggggtggtttatcttctcgatattacacgctatgcggccattgaagatcgttatgaagatgagcaagtagccatcgggcaagtgttcttagataattatgatgaaatcactcagacaatggatgatcaatctgtttctaatctgaataactatgtcaccaacgagttatcacgctgggcgaatcaatttcagatgttcttgaagcgagttgatgatgatcatttctttgttttggcgtacgccaaatcattacacgccgctgaacaagagaagtttaagattttagatgaaattcgagaagaaacatccaaacaaaacttcccactaacgttgagtgttgggtttgcttatggggaatccgatttagccgttctagcaacaacttcacagagcaatttggatcttgccctcggtcgtggtggtgaccaagtcgttgtcaaagcgagtgaaggacaagcacgtttttatggtggtaagactaatccgatggaaaaacggacgcgggttcgtgcacggatgatttcacaagccttacaagaaatcttcaaacaagttgacgaagtctttgttatgggccatattcggccagatatggatgcattgggcgcctcatttgggattcgccggattgccgagatgaacggtaagaagtgctacgtggtcgttgaccaaaacaatattcatacagatattcaacgtcttttagaggaagttaaagcctaccctgaaattgcagtggaagtgttgtcgcctgaagaagcgctcgaaaaagcaacggccaatagtttattagtgatggtcgatcattctaaaccatccataacaatggcgcctaagttgtacgagaagcttgctcagcggacgattgtcatcgatcaccatcgtcgtggggaagagttcccagaaaacccaatgttggtttatatcgagccctacgcctcttcaacgtgtgagttagtgacggaaatgtttgagtatcaaccacaaaatgtcgctaatattaacaagttcgaagccacaacgatgttggctgggattacggttgatacgcagtcattttcaatgcgaactgggacgcgaacgtttgacgcagctagttatttacgttcagttggggctgatgcttcgatggttcaacacttgttaaaagaaaatgtcgataattatattcaaaagaatcatttaattgaaaccattgaaatggttgagccaaatatggcattatgtatgggtgaggacaaccgtacctacgatccggtcatcgcagcacaagcagcggataccttgctgtcattgtcagacattgaagcctcgtttgtcattgtgaaacgcccagatggcatgattgccatttcagcgcggagtctaggtgatgtgaatgtgcaagtgattatggagaaattaggtggcggtggtcatctttccaatgcggcaacgcagatggcagatacgactgtttccgaagccaaggcgaagttattaacggttttggcagagctatttgatccggaaacggacaaggaagcaacaaacgattaattagataaggtggtcagaacaatgaaagttattttcttagaagatgtacgcggtaaaggtaaaaaaggccaagtgaaagatgtgccagatggttacgcacaaaactttttaattaaaaatgggaaagcaaaacccgcaacatcagctgctatcagtgctttaaaaggccaacaacatgctgaagctaaaaatgcagctgctgaattagcggaagcaaaggttttaaaagccaaaattgaagacgataaaacaatcgttgaaatcaaatctaaagcgggcgaagacagccgcttatttggttcaattccaagcaagcaaattgcccaagcattggctcaacaatatcagatcaatgttgataaacggaaaattgatttaccagaaccaatcaaagcgttgggttaccggaatgttgatgtacggattcaccctgatgtaacagctacgattcgtgtgcatatcgtaaccgaataataaaatgaatgattgaaaagaccgtgattagcaccactatcacggctttttttattgctgaccaatcggtgactgttgccagtcactggtattttgagtaaactagtgagtaattgaagtcgattaaccaaaggagtaaaaatggtgaataatgaactaattgaacaagtaccgccgcagaataatgaggcggaacaggccgttttaggggccgtctttattagtggcgatgcgctcgttgaagcaatggaatacgttactgccgacgatttttatcgtaaagcccaccgtttgatcttcgagacgatggttgaattaaacgaacggggtgaaggaatcgatgcggtgactttaaagagtgccctcgatgcgcagaaccaattggaagatatcggtggtattggttatttagctgagttggctgaggctgtaccaacggcagccaacgtagtttattatgccaagattgtctctgaaaaagcaatgctgcgccgtttaatccaaaccgctcaaaatattgtggcaaagggttacgcgcaagatgaagacgtcacggatattttagataccgctgaaaaggaaatcatggatgtttccgaacggcaaaataaggccgggttcaaatcaatttcagatgtcttaacgagttcaattgaacaaattgataagttatatcaaaatgaagaagacattacgggtctatcaacgggataccgcgatttagataagattactgcgggtttgcatgaagatgaactcattattttagcggcccggcccggggtggggaaaaccgcgtttgtcttaaacattgctcagaatatcgggacgaaaaccaatgagaatattgcaatttttagtttggaaatgggtgctgaacaactcgttaaccggatgttgtgtgcagaaggaagtattgacgccaaccatctaagaaccgggcaactcgacgaacttgaatggcagaatctaatcgtagccatggggagcctttcaaaagcgaatatctatattgatgatacgcccggcgtgaaaatggcggaaattcgggcgaaatgtcggcgcttagcgaaggaaaaagggggcgttggcttaatcgtcattgattacttgcaactaattgaaggttccggccaagaaaaccggcaacaagaagtctcggcgatttcacgtcaattaaagaaattggctaaagaattacgggtaccggtcattgcgctctctcaactctctcgtggggttgaacaacgacaagataaacgcccagtcctttcagatattcgtgaatcaggatcaatcgaacaagatgctgatatcgttgctttcttatatcgtgatgattactatcgcgatgaacctagggaagatggcgatgatttcggtggtggcaatccgccagcaccagcgccacagcagtcagatgatgcggacgttggagaagttgaagtgattatcgaaaaaaaccgtgcgggtgcacgagggacagtcaaattattatttgtcaaaacgtttaataagttctcatcaatttcgtatgcggaccaatagtaatgactatttttaataaatagtgaatattatcgtaaatgaaatacttaaaaaaaccatcataattaaagtaaaaactttaattatgatggtttttttgatgggcatattaactgatattcgttaattagatgacaataatgggagggagaaatagaatgataacatcgttactttagttttatgagaatattctaaagatatttaaaagtttatttatatccaaaaatagttaatataatgcgaatctatagtgaatttcaattaatattaacattgttttccgtggctatggatggcattgttgtgttaagcactgaatgggcaactttttaccaaacacttacgcaaacaccgattacgattattgctaatgcggttgaactacctaagcaatacaaataccatagtcagtctaaacaaattatcacactggggcgcttaggcgaacgtaagggcacctacgatattctaaaattagcaggggtgattcaatcccgttttccggatattcaatttacgttgtatggtgatggtgaacaggggaaggtccagcaagaaatagaccgcctaaagttaaccaatgtgcgccttggtggctggttagctttggcggatcgcaataccgttattcaagaaagcctgttacacctattgcccacatatcaagaaggcttaccaatggcaattttagaaacgatggcttatggaattcccaatttagctacgaatgtcggggacattccacaagtaattgagaatcatgtgaacggggatttggtgacaccaggagatgacgctggcttagttcaacaactcagtgattttctaggtagtcagatgcgacgtgaaacatattcacgaaatgcccggcaaacgattaacgactgtttctcattgcaacagtattttagccgatggcaccagttttatcaaaggattatgaatgaaacggaggaggaatgatgaattctatagcgcaatcgactgataaattagagttgattaatttctatcatgagatggctcaaatttcagcaaacattagtcaagttttaaatgaagacggagttaccatcgaacaaattcgtattttacaaacattaaaacgctataaaggtattaataatagtaagattgcacaagtattaaaaacatctaccgcagcatcttcaaataaattacgtaaattagaggatcaggggtatatcagcaaacaatatggcaaacaggatgatcgtcgaattgttgatatagcagtttctcccgctggagaatcaatttatcgtcgatttgagcaggcgtgtgaaacttacattaaaagtattactgaatcagataagaaaattagcatgccagaattaatgtagctgtttgaaatgacaaatagacttgctagaagtattcggacaactgaaattgaatagacaaaaaaagtgcccacaaacggttaaatttgtaggcactttttttgatttatttttgttcagcatgttttgctgcaattaatgaacgatagttgaatagtaagtttaagatgacagcgctgagactgccgactactaagccgttgcctagaattgtgcgaacactcgttggtagtgattggagcaaggttggatgaattgctacccctaagcctaaggcgattgaaacggcagcgactagtaagttgcggttatcatcaagatcgactttgtgtaacatcttaatgccttgaatcccaacagtgccgaacataacgaccatcgcgccccctaaaacagcgcttggaataatggttgcaacggccccaatcttaggtaataatcctaagatgattaagaagaatgctgagtagtaaactggttttttcgttttgataccggataattgaacaatcccaacattttgtgagaacgttgagtaagggaaggtgttgaacaatccccctaagatagcggcaatcccttcagcgcggaagccccgcttaagatcattgctagtaatgtcgcgcccaacgatttcaccaagggcgaagaagacaccgattgattcaatcatggtcgttaacgcagccaatgacattgaaacaattgatgaccattcaaaacgaggtgttccgaagtagaataattcaggtaatttgaaccaacttgcttgacctactggatctaaggacacaatcccaatcgcagctgcgattaaggtcccagcaataatcccaattaaaatggcgatttgttggatgaagccacgcccccagatactaaaaatcaggattagggcaatcgttgaaaaaccggtaattaagtttggtgtactcccaaacgacttagcagcaacatcgccaccgcctaagttttggaaagcaacgggaatcaatgtgaatccgattaatgtaatgagagaccctgtgacaactggtgggaagagccaacgcaaacgtgcaaacaagccagaaactaacaagatgaaaattccggcgccaataatactaccgtacataacgtcaattccgagttggctgttagtgccgatggcggctaacgggccaacgtactcaacagcacaacctaggacaaccggtaatgcaatcccggtcagtggggttcgttttaattgtaatagggtcgcaaccccgcacatgaaaatatcgactgaaacgaggtaagtcatttgagcggtattaaaatgtaatgcagccccgacaagtaatggaattaaaacatcgccagaatacattgctagaagatgttgtaagccgagaatcgctgctttaatgtggggaagcttttcatttggattaattggctgtgctgaatttgagtgtatatctgccacgagtgtccctccaagataatcgttaaaatttagttaacatttagtttagcacacgccaatagtgacttcaattagaaattaagtaaaaaacgaatataacattcttaaataatcgcgatagttcgcctttgtgatgatgcacaccaactgttcgatgacaaaagtgctttcttactgaatgattcgcttgaaaaaggcgataattgttcttaaattaccgattattatgtttcacatgaaacgataatctgaaaactgggaagaatcttgtttttttagggtaagtacgttaaactaaaaggtatatgtgaaacaataatgttccacgaattaaacgcctactttaaagcatagttaaggagaaataatgacaccagcgggttttgcagcgacgttaaaaacatacaatattcaagtttcacaagcacaaatggatcagtttgaattgtatttcaaacggcttgtacaagtgaaccaacaagttaatttgacagccattacagaacaagaagcagtttatctcaagcacttcttcgattctgtcacaccaactttgtatcttgaaaaactacgcactgaaccccttacgatctgcgatattggtgcgggcgcgggttttccatcgttaccaatcaaaattttattcccgcaattgaagattacgattgttgattcattaaacaagcggattcacttcttagaagaattggtccgtgaattaggcttgtctgatgtgacattggtccatgatcgagcagaactgttcagcaacccgaagagtccatatcgtgaacagtttgatattgtgactgcccgggccgttgcttcattaaatgtactggtagaattctgtttaccaactgttaaagttggtgggcagtttatcgcattaaaagcgagtcaaggtgaaacggaattggcagaagccaactatgcaatcgaaacacttggtggccaatttgcacaagacattgctttgacgctaccagaaacagatgatcaacgacatctaatcgtaattgataaggttgtaccgacacctgccaagtatccacggcgggctggtgtgccagttaaaaaaccgttaatggctaaggaggaaaaataatggcactctcattttttaataagaaaaaagacgataaaagtattaatcaagtgatcaaagtgccggtttcagcaattgtgcctaaccggttccaaccacgaaaagtatttaatgcggacaatatcgccgaattagcaagcacaatcgaacaacacggcttattgcaaccgattatcttacgtgaatatgaagatcaaaaatatgaaattattgcgggtgaacgccgttttagagcgattcaaaccctcaaatgggctgaattaccagcgattgttcaaactatggatgatcacgaaacagcttcaatggccttgattgaaaacttacaacgcgaagaattaaccgccgttgaagaagcacaagcttataaggacttaatgaagctgaacgacttcacacaagccagcttggcagaaaagatgggtaagagccaatcttttgttgctaataagttgcggctattgaaactctcacaacccgttcaagaagccatcatgaatcatgaaatttctgaacgacacggtcggagccttttacggttggatgaattcaagcaacaaatgattttacaccaaatcttggctgaacaattaacggttaaggatacggaagcgctggttaacaagacgttgaatcctgaaccagaatcaactgaagagacagttgatgcaaccgatgacagtttaaaagaagctaccacgaaggcaaaaaaagcgaacgataaagcaaaaaaagcaattgcccatgatacacgcattgccgtcaacaccatcaaaaagtcggttcaaatggttgaacaaagcgggattgccgtcaaagccaccgaagaagaacaagatgatgtttatcggattacgatcgaaattccaaagcaataagggaggctcattatggcacacgttatttcaattgcaaatcaaaaaggtggcgttggtaaaacaacgaccacgattaatctaggcgcttgtttggcggatgctggcaatcacgtgttaatcattgattcagatgcacaagggaatgcgacaagcgggattggggttcaaaaatcccaagtcgaaaaagatatctatgatgtgttggtcgatgaattcccactaaaagaaacaattattaaaacatcacataagaacttagacattgttccagctacgattcaacttgcaggggcagagatcgagctaacatcacagatggcgcgtgaaatgcgcttgaagttagggttagaaccagtcttagccgattatgattacgttttgattgactgtccaccttcattagggcaactttcaatcaatgcctttacggcaagtaattcaatcatgattccagttcaaagtgaatattatgccttagaaggattgagccaattgttaaacaccgttcgtttggtgcaaaaacattttaacccaaacttagcgattgaaggcgtgttgttgacgatgtatgatgcgcggacgaatttaggggctcaagtgattgaagaagtgcgtaagtattttggtgatcgggtttacgacacgattgtgccacggaatacgcgcttagcagaagcacctagtcatggcgtatcaatcattgattatgatccaaaatcacggggcgctgaagtttaccaaaatttggcaaaggaagtgttagcagctcatggcaactagaaatggaaaaggattgggccgcggtttggatgctgtattttcagcgttcgaaggccctaataaaaaccgggcggatgaattagttgaagagattgcacttgatgatattcgtccaaatccctatcaaccgcggaagacatttgatgaagcggctttggctgaattagcagcgtcaattaagaagtcgggcgttttccaaccaatcattgttcgcaaaagtattaatggttacgaattaattgcgggtgaacgccgattccgtgcgtctaagttagctggtaaaacagcgataccagccatcacgcggcagtttgatgaatccgcaatgatggaaattgcggtcttggaaaacctgcaacgtgaagatttaacgccgttagaagaagcccaagcttacgatacactcttgaaaaagttaaacctgactcaagctgaagtatcagaacggttgggcaagagccgcccatacattgccaattacttgcgcttattgggtttacccaatgacgtgaagacgttattacaaaatggtgacctttcaatgggacaggcgcggacgttattatcattgaagaaaaaaagtcagattagtgcattagcgaaacgcacgattgatgaaggcttaacggtgcgacaactagagcagttaattaaccagatgaaccagattaaagctgcgaaagtgacgaagaccaagattaaatcaccctatattcaagcgagtgaaaatcaattggtcgataaatttgacaccaaggtcaatattgcgattaacagcaagggtcgcggaaagattgagattgattacagcacagtcgatgatttaaaccggattcttgcattgctagatgtgaatatcgattaaagtgaggagtcgagctagatgtatacattaggcgatcttgttcagatgaaaaaacaacatgcctgtggcaccaatcgctttgaagtggtgcgcttggggatggatattcgaattaagtgcatggggtgcggccacgccgtcttattaccgcgccgtgaattcgaaaagaaacttaagaagaatttggtgcctgcagcacaagtcgttgttgcggatgaaccccactatcaagagatgcaacaaggtcccaaccaaactaatttttaaagtaaaggaaagtgtaaaaaactatgtcattaaccgcaggaattgtaggattacccaacgtcggaaaatcaacgttatttaacgccatcacgaaagcaggcgccgaaatggcgaactacccatttgccacaatcgaccctaacgtcggcatggttgaagtccctgacaagcgtttagaccggattcaagaaattatcccggctaaaaagatcgtgccaacgacttttgaatttacggatattgctgggatcgttaaaggggctagcaaaggtgaagggcttgggaacaagttcttggagaatattcgtcaagtcgatgcgattgtgcatgttgtgcgcgcctttgacgacgataatattacctctgttaccggaactgttgacccgttagacgacatcgatacaattaaccttgaattgagcttagctgatttagaaagtgttacgaagcgttatgcgcgtgttgaaaagattgcgcggacgaaagacaaagacgccttagccgaattcgaagtgcttaaaaagattaagcctgttcttgaagaaggcggctcagtacgttcaatcgaatttaatgaagatgaagcgaagttagttaaaggcttcttcttattaacatcaaaaccggttttatatgttgcaaatattgctgaagatgccatggctgatcctgatagtgtggattatgttaaacaaattcaagcgtccgcagctaaagaaggcgccgaagtaattgccatctcagcaagaactgaagaagaaatcgcctcattagatgatgccgataaggctgaatttttggaagccgaaggggtgactgaatcagggttggataaattgattcgtgcttcatatcatctactaggcttagcaacattctttaccgctggtggaaaagaaacccgggcatggactttccgtcaaggcatgaaggccccacaaaccgccggtgtcattcattccgactttgaacgcggatttatccgggcagaaacagtttcttttgctgatttagatcaatacggttcaatgcaagctgttaaagaagctggccgtttacgtttagaaggtaaagaatacatggtcgaagatggcgacatcatcgaatttagatttaacgtttaatgataattgaggaggaagacaattggctaagaacgaacaaccagtagtaaccccagaaccagttgatattgaagggttagaagcaaaactcagtaagaaaaatgcggactatttatttaagttcaaacgcgcattaaatgccgaacaagtgccagcagaacgccaaactgaaatcttggcagaaatgttaccagaaatggtagcagaacaacataagggcaagcctgcaacacaagtatatggtccagtgacaaccaagattgatcaattgttgcacgcgccaaaacgtcctaagcaaacatcacttcaactccaaatgcttgataacggcttaatctttttaattatgtacctagcctttaacggaattgcggcttatttctcaacgaaggggtcagcaaccagcattgggattacatcaattgtcattacggctgcgcttgcggggatcatcatgacttatccaatgcgctatacgcaaatgccaaaagaacaacggccaccattttggaagatggcattggttgtaatcggcttaacactagcctttgttgcggcatacggtgtgacaatcttgattccaagtttcttgaatccagtcttgccaccacttgttcaaatcgtaattgcagcactcttaatcggcgtgcggatttatatcaaacgccgttttaagattacaggttcattcttcggttaatattacccgggaaataaatggcaattgaggaggatttgagatgattagcactgaagaacggcaaattggggcagtcagtacgttgattgtggccccaagtggtcaagaaaaagcggtattaccaactgtctttgtatatcatggttggacgcaccgtaaagagtcagaattaatggtcgcccactttttagccaaggctggttttcgcgtggtcttaccagatgcgaagtatcatggtaaacgacatggtagtcagctcttttctgagttaatgtttgaattttgggatattgtgatgcagtcggtcaccgagtttggtgaactggttgcaacactgagtgctgaaggcttagttgatcctgaacggattggtgttacagggacttcgatgggtggcattacaaccgatgcgattctcacccgatatccgaatgtcaaaattggcgttgataagattggcgcaccaatgcctgtcgcacttgctaaatggcaggttagtcaattaccaacggccttacaaaccaagtatcaagatgcgattgaagataccttagcacggttagcggcgtatgacttatcaatgcacgttgatcacttggcaggtcgtccattgcatttctatcatggaactgctgatacgatggtgccatatcaattcacggcagattttatgaccgaaattcaggcgcaaccaagttcagccaccgcattagtgacattgacgacggaagaaaatgggcaacataaagtatcagacgatgcccagctcaaaaccgttgaactgatgcaacagtacctactttaaaaatgagaaaagccgccagaacgtaaattgttctggcggcttttttgatggggacacaaaaaaaccagccttggggagactggtttctagcagatccgaagatctaaaaaggagtaaggggtacacgtattactttgggggaataatacgtgcgtggtagattgcgtctaccttaattttactttggaggagtaaaatgaaaaagttaagtagtatgaaatagaaaagattcgcttttctatactcaatactataatgggaatttgtgaagattttgtgaccagaggtttatagatttatgaaaaaagcaataaggaaagtttaagggtcaaagagtatgctaaaatgaaggtactttataagagatcgagagatgattgatatgacaaaggggaccgttttatttgatttggatagaacgatagccgattcgcaagaaggcatcgtgaacgccttggaatatatgattgaggagttatcattgccgacgcaaaccaaagctgaactggtcacattcattgggccacccctcaatgaaacaattatgcgtgagtttggtttaaatgcagctgctactcaagaagctattaaagtctttcaagcctattatgcgcctaaagggttgtatgaaaatcaactttatcctggcatgcgagaaaccctagcggcattgcaagcacaggatttacaactggcaattgcgacttcgaaaccagaaccattcgctaagaaggtcattgatcatttagagttaagtgattactttagcggtgtttttggagcaagtgttgatgagacaacgcgggtcaaaaaagcggatgtcattacttacgcattatcagaacttggtctagcaccacaaaccgcaccattactgatggtgggtgatcgccaaaatgatatcttgggcgctaagcaaaacgcgatgaatgcagttggtgttagttatgggtttggcacaatcgcggaactcaaaaaggcgggtgctgtccaaattgtccaacaacccagcgagttaatcacatcattaccggctaatcttaaattttaggcatgctgttgcgcgttagcgaccattaaggtataaatccgcgcgacatctttcgcattgccacggagctcataatcggcgataaacggtgcatcgaattggaccgcataccgtttagcagttaagcaatattgttcgttgaagttgcggttcccgctaccgattactccataacaaaggcgtgcgttctgcgcataatcgatgtattcgcctaagctattggtcattaattctttaacgccattatcaatgccgttgccaccatctaagtaagttggaacgaacgcgtaaaacggttcggtctccgctttaaagggggtcgcatccgaaatttctgtgagggtaatggttggtaacgctgggttattagcatgttgttgcgctgcataatcctgtaaatccgttacaaatgaacgtgtattaccagcaattgaaatatagagaatcgttaaattttttaacattgaatggcctcctgtgactgataagttcactttagcatttaatgattaagaatcctagtcttgaagtttaatagggttcgtgaatagaaagggtgtttaatcaatggaaccaattagtcgtttgaatcaaaatcaaccaagcgtgcgaccacatcgaggtttaagtcgctttttgacgttcttaatctttctttgcgttttccttggcattggtggcatgattctcagcctgacagttttgagagaatcatttacgcaagaacagctcagtgaaccgaagacgttagctgcgatgactgataaaattaacgttgttttattagatgcggcacaaaaaaatgggctaccaactgaagtacaagtcaaattactgactcaatctgatgtgcaggccgatttaaagaaaactgttcataatatttatacaggacaagaaaagccgttacccacagcacaaatgatgggacagcttgcaactcatttagaagcagttgtgcctgaaaatgcgttgacggaatctttaattaaaacggcagtggttgcggttcaaccaccactacaagaatacctcacgaaccaaattgaagcaccttacttagcaccactagcgactgagatgttgtttgttagaaatgtgatcaatatcttaacttgggttgcaattattatgggaattgttcttgtactagttcaatggggactaagtggtcaattccggtatgtattagggagtgttggtgcaagttttgcttggagtggcttattcttggcattaggggcggctgcgtttaaatatagtggcattgttgaacaaattgctcaaaaagcgggcgattttaatcaaacaattaccgactatgggttggctgttctggattatggtttgaagacaagcacgattgttttaattggcggggcgattgtctggttggttgcaacgcttctccaaagagtacgacattaaaaaagatgacctttgcgggtcatcttttttaatagggcgtaatcacgatttcatggttcaagtagttagccatgtagatttgttgaagactgtagccttgctgttgaatgtcggcgaggagccattcttcagtttgatcgattaattcaagtgcttctgaattaatctggccgtccataatcagcggatatttaatcgtggcgtcgcctttttgcgtaatggttaattgtccgttttgttccaagattgcgcgactgaccgtgcgaatatcgctaatcccggcaattcggagtttaaacgatagatcctgtgcggataaactattcttagaggccgtttgaatatcaatgtggccgttggtgataattgtttgtggattaccaattacccagcgtttaatccagcgattgtgagtggttagaaacttcattgtgaagacgattaaggtccagatgagtaaaacgagtaagaattgtaagagcgagatatcggcattataaatcataccgccaacaatccccccaagaacgtaattttggagttgatcaatcccactgctaggggctaaattccccttgccagagaggttgatttgtaacactaaacagaagaaaccgaaaattaatttaatggtaatatcgaaataagatggcatagtaaactccttaatcttgataggtgatgtcttggctaatcaactgagctttttggagttgataactagtaaaattgttatcaaatatgacttggtagttttgatgaccgacgcgcactaccatgttttgctgaagcgaagtcgtgttgactgcgacggttttaaggctagctttctgcgcagtcgccacacttctaatgaattgcgccatctgagcttgttgcgagtgggcggtgttaagctgttgaatccgtgtatattgaatgccggcgagtaaaatcccaactaagccgaagatgattagtaagtcacggtacttcgaatctgaacggtggcggagatattgaacgaagaagatgatgattaaactggcgatgatcactgacagacttagtttgagatagaattcgaaatcattctgattgctaaagtatgaataccgataaaaaagcataatgacctccttaaataaacggttaagcctattgtagcacactggctgagcagatagattgtgtcaaatttaaaacggcggtagactggaagcatgaaagggatgattgatatggcattaaaaataacacctgcagcagttgcgaaaatcaaggataagatgacaccgggtcaaaaaattttattggacttagatgacggtgttggtccattttcaaacgttggttattgctcgttggatacgaactttagattgctattagtaccagcggatgctgacattaaagattatccagatgaatttgaatcaaatctaggggctgtttactacaaagattatgcagctggctactttgatgaacatgaagtattagacgttaacgaaaagaatcaaatgttaaccttgagtaataacagtggcttaattgatgggcacatctccattgtcgtatttgagaatgaatcaatgactcattaataactgtggcgtcgggcagaaagtggtccggcgttttttgttgttcatttgtactttatccacattggtgggataatgacaaaaacagttttattgaggagcctgacatgaaaacagcaattgtgactgatagtgcggcgtatttagatccacaagttgccgccgaccataatattactgtggtaccaatcaccgttatttttggacaacaaacttatttggaaaatatcgatatcacgagtgaagcattttacgataaaatgcgcactactgaaaaattaccaacgacttcgcaaattacaatgggtcagatgcaacaggtttttgatcaattgataaaagcgggctacgatgaagtgatttgtatccatctttcaagtggcattacgagctttgtcaataacctaaccgcctacgcacagtcggttgaaggcatcgaagtgtatccttttgattccaagattacgagtgccggtgaagggttcttggccttggaagcggcgcggttagttgcccaaggtgaacatgccgcaactatcatgccgaaattggtagctttacgagcaacgatgggcgtttatttcgttgtggatgatttaagccacctcttgcgaacgggccggatttcgaatagtgcggcctttgtcgggaatcttttgcggattaaaccgattttaagttttaacgatgccggccaaattgttgccttaacgaaggaacggaccaagaaacgggcctttcaaaaagtattagcggatttcaaagcagcagtcgaatctgttgactatcccgtacgcgttagcgtgattgacggtaataatccagaagaaagtgtgcagtgggtcgcaacgttgacggaaacattcccagggatgccgattgaaacgagtcacattggtcctgtggtcggcgtgcacaccggcgaaaaagtaatggggctcatctggagtcgtgattatttagcataacgaaattaaaaaacagccttgcgcatttgcgcaaggctgtttttgtttaaatgtgtgctattagccatctccttgtggttaatcctcaggagatggctgatagcacactctttttttaattggtttcaataattgtattgttggctgtattattttgtggttcgctggagacttcaaaccagtcgatgtaaccgcgattgaattcgaccacttttaatgtgaattgattgatatgaatgaccgcactttgttgtaagtcggtgaagttttctaagacataaccggccagggtcacgctatctgaggcttcgaaggcatcaattttagtcttgaagaaacgttcgaaatcatagagcgtcgttttcccactaacacggtaacggttatcgtcttctttgatgatgtattcatctgaaacatcgtcaatttcgtccttgacggtcccgaatagttcttcatagatatctttatcagtgacaatcccactcgtcccaccgtactcgtcaacgacgaccacaattggggtttgcttattgatcatttgattcaacaaactgtgaataggggttgcttctggaacggagataatcgaacgcagtaatttgctgacgcggattgaatcgtcgacttgtgcctgacggactaaatcatatgcgtagacgtaaccaagaatcttgtctttatcattttcagcaaccactgggaagcggctaaagccttgttgtaagtagtcttttaagacgtctttaacggtatcggtgatatcgacgacgtagagacttgtgcgatcaaccatcacatctttggcaatccggtcattaaagtcaaaggcccgttgcatgtaaactaaatcgttgcgatctaattcaccaccagtgacggcatttttagagagactaatgatttccgcttgggaaagcacatcactaccttcttcagcaggtgaaaagccgattaatttcacaacacccgttgcggaaatgttgagtaaccaaacaaatggatagaagataatatgacagtaatggaggggcttagcaacagccatcaacatctgcattggaatatcaatactaatattcttcggcacgatttccgtgaaaaccacttctaaataggttaagactaacacgccggcaactgcgccgatgatgtgtaagccaccatttgaaatcaggtgagtgagaccgagcagatcgactagaatggtttcgacggttgattcaccaatccaccctaaaataatcccggcaacactgacccccacttgggtggttgagagatattcgtttaagttttgcgtcattttaagcgcaagattcaattttttaggattaccatttcctgaatggatggcatcttctaaggcacttggccgtgtttggacgagcgcaaattcagcggccacgaagaaggcggctaaaaagaaggtgaccaacataacaaatagattagtgaataactcaccacttgacaaaataattccccatttcttaactaactagttctattttaccattctcaagcttaaaacggtaaataacgtcgggctttagtccgattttatcggattcaataataatgaaaataccataatttagggaagaggtaaactaaattgttaaatatctaaactaaaatacgctttgtcacattttgacgttgatctgtatcgaaaaaagccactgtgttagtggcttttaaacagttttagaatgttgcagtatcaggatcttgcgcgtgtccaacgacgccgtcaagtgcatcaattgcagccatgtcttcatcggctaattcgaagtcgaaaacttgggcattttgttggatgtattcagcatgcacagacttaggtaatggtaagaagccgtgttgtaatgaccaccgtagtgcaatttgtggaattgagcgttggtatttgtccgctaattcttgcatttctggcacactgaaaatcttcccagtcccaagtgggctataagcttctaataacatgccatgttcacgtgagtattgggcagtttcaggttctaattcgccaggggctaagaagagttggttgaccattggttgtaccgttgcagtctttttgagcgcttctaaatggcgaacacggaagttgctgaccccgatggcccggactttaccagctttgtagagcatctccattgcacgccatgtttcggcgttggctgtttcccaatcatcacggtaggcaattgggttgggccagtggattaagagcaaatcaacgtagtcggtttgtaatttcttgagtgattcttcaaaagagctgattgttaaatcataagtgtgattactattccagattttggtggttaggaataaatcggaacgatcaacgccactagcttggatggcctcaccaacactcccttcattaccgtaagcttgggcggtatcaatgtggcgataacctgccttgagcgcctcttcaacagcagctacggctgtttgaccgtctggtgtttgccaagtcccgaagccaattttaggaatttgcacgccgtttgtgagcgtgtatgaactcgttaagttagacatattaaaacactcctttatcagtttaaaatctctacttacagtttacttgttttcgatagagatagacagaaaaccgacttattccccgggaaataaaatcgatttgtcataagctgagcaatttggcctgaagtgcgggatcaacagcatagaggtaaaggccgtttctagcgcggctcattagaacgtagaggctattaagaataatttgctgtttcgcggcttcaggatcagccggctgtgctgcgccggcaaatgcggcttggtcctcgtaatattcaggatgaataactagccgctcactttgtggatcatacgtgacggatggcccgatgatgacgccggcatagttgagatcaaagccttgaatggtgtacacggatccgacttcatctatactatcttcacgttctgcccaataggttttagcggttggctgataccgatcccagcgtaatttgaatgtcgatgtctcaacgaagtgatcgtgaccatcattgagtgttgctggaaaatcgtaagtagctagcatgcgtgcaagcccactcgtttggtttttaaagcgaatcgtttgatagagctcattggcatcggtgaatattttgaattcaaagtgtggatcatgtggcagggcagcgacttgttgttgatgaaaggtttgcacccaattttcaacacttggatgggcttgcatccgaaattgatgggttagttgcgcggtctgatggggagcagcttcaattcgttggcggagttgttgctgttgccagaagctcttcactttaagcacttgctgttcatcaaaaatcagaatggtgatccgactgtgtcggcgaatttcatcgagttgatttgtttgattgaagtggctataggggtcggatttggttaacagtaggtgtgcctcatcaacgaggacgatatcggcaagttggtggtttttagccgcttgattgatgaatgtcgttgggcgttgaaaatcttttttcaataaaacgggggccgttgttgtgccacttttgtagagttttagcatttctggatgattgaccaatagaacgttttgactgccatagagtggcgaggtgggtgtttggcgcgcaagtgtctgcagtaccttgaagacactgctgagaatcacgctcttaccagtcccggccgcaccttgaatcaagaaggtggcgtgttcggcgtgcgcttttgccaaacaaaattgaatgacttgttcttgtagtgcttgttgttccgttgttagttggttggcgggacgattgagtttataaagcgcgctattttgacgctgtgcatttggcaaagtgaggactcctgttcattcatttcaataaaaaaagccccagtagatgtagaaataacatcgcctggggcagtcgtgctaatcgacaaaaattagttggaattcatgttgcactaaatcgagattgacggagacgtggcggttgagatcggccacaattttacgcgctaatgttacccgttcttcgaagcttgtggcaagtgccgcgaattcagtttgtttaaagttgtagttttcagtgataaaaatcgcgtctgtgacatataacaggttattttcatcgtgacgagaaccgctctttaaaacggcatcgatataatggtaaagctgagtaggggcaaagttcaatggttggtctaaaacggttgtaatctgaaaatcaggtaaatcgtcaaccatttgtgtgtttagtgtgacttgggttaatgcttgatacagtttcatagtgacaccttcctaatgttgagatttaaggtcgtgcttgtggagcttctaagtggcgttgaataaagcctaacgtcacatcagcgataatggccatcagggcggttggcagggcaccagctaagattaaggcgccgccattagtggcgttggtcccgcgaataatgatgtcgcctaaaccgccggcaccaacaaacgcgccaatcgctgtaatcccgatggcgaccactaaggcattgcgaatccccgccataatgacggccaatgataagggaagttcaaccatccgtaacagttgccaatttgtcatgcccatcccgattccggaatcgataatattatcggaaacattctccataccggtgtaagtatttttgataatcgggagcaaggagtataaaaagacagtcgcaatgacggttcgtgtgccaagccccaagccaagcataatgattgagagcattgcgagtgaaggcactgtttggatgacattcgctaccccaattataacattactgagctttttccggtgcgcaataaaaatccccaagggaatgccaatcaacgcggcaagtaaaacgccataaatcgaaatcaaaaaatgatgactaaactgccgtaaaacataactgccattatgctggaaataatagacaagttgttgccaagtatttaaattagtcatttagcggctcctttccggaaataattatgttcctgaagaaattgttttgcgactactgcgggttctagtagatcattatcaactttaaagttgagggtttgcatggtgtcgaggtcgattttgccatctagacggtgtaaaaggggcgctagtgctggctgttctttgagaatctgatcagtggcgaccacgctcgcatcgtatggtgggaagaagcggcgatcgtcttttaagacttttaagtcataacttttaatccgtccatcggttgagtaacctaaaacgacgtccattttaccagccgccagtgcgctgtaaaccagtccgatttgcatgggcgcaactttcttgaaatcatagccatacgtttctttaaatgcgggatagccatcgccttcgtgatttacccagacggaatcgacaccagctgttagttgatccgccacttttccgagatcactgacggtttctaaatgatatttcttggcggtttcctgggtgaccataaaggcataggtgtccgcaaacccgtaggaagggaaccatgtttggttgtaacgatctttgaaagcttttttaacgattttttgggctttttcaggatctttagtaggtttcatttttaaagtaccagtaagttcagttccagcgtagcgactagcagctatgtcggcgtcaccacgaattagtgattcatgcgttaccgttgaagaacccagattattaattaaagtgaccttattttgtgtttcgtgggtaatcaactcgctcagaatattggcgagaatttgtgactcagtggtgcttgaagagctaatgcgaattgtttgtgattgacggtttccgatgccaagtgactgacagccacttaacaggaggagactgccaactaataatccgcaactcgtaatgaatcggcgtattttatgcataggagcctccttatctgattgcagcgggggtcagttgtttttccaaccggcccaagccaaaatcgactagcaatgctaacaatgtgacgggaattgtcccgccgatgattaaatccggtttgaaaagattcaacccgttgaaaatcaagtcgccaagaccaccagcgccaatatatgaagcaagggttgcccaagcaatcacgtaaaccgcagataggcgaattcctgccataatcacgggggtcgccattgggatttccacttgcataattgattgtaccggcgtcatgcccattcctttagcactatcttttagaatcggatcgacatcgttcatgccgatgtaggtgttccgcaaaatagggagtagtgagtagataaataaggcgatgattgctggtactttgccaatcccaaagagcggaatcattaaagccaatagtgccaatgaggggacggtctggagcatgctggcaatggcaatcactactttggcagttttaggaaatcgggtgagggcaattccaaggggcaccgcaactattatgcccagaactaaggcgattgcggaaatgtagagttgttcccaagttttaatcagtaaatcagagccatgttctgttaaaaaagtgagcatcatcgattcctccctttctattgttggtcggattctgcttcagattcgtcagtatcaccccagacagcatcataaacgacatcgactagggctgtccgggtgacaatcccaacaagttgatgatcatcgttgataacgggaacgtatttccagccccgtttaagaatccgttcaatggtatcccggaccaaatcattttcgttcacgtaactaatcttggtagacataatgtcaccaacactagttgcgtctttgtaatgatggtcgatattttcaatatcgacgagtccctttaaatgttggttttcgtcgacaaccagtaaggtatcaacgcggcgttggcgcattaagcgaatcgcatcaactaatgatttacctggtgtgatagcgactggacttttaagcatgatttggccaacagtttcgacatttggtttggcttcgatcaaacgatcgtgaccgattaagtcttcgacgaattggttggcaggatttcgcaagatttcattgggcgttcccatttggatgatttggccgttatccatgatggcaatgcgtgacgctaatttgagtgcttcatccatgtcatgggtgacaaagacgattgttttaccgagttctgattgaagttgttttactaagtcttgaagtgcctcacgcgtaattggatcgagagcaccaaatggttcgtccatcaaaataatatcttgtccagctgcaagtgcgcgaatcaccccaattcgctgttgttgtccacctgataattggcttgggtaacggtctaaaaagtccgcaggcatttccactaattttagtaattcgagcacctttgcatggcgtttttctggggaccattttaagagtttagggacaattgtgatgttatcttgaatagtcatgtgtggcattaagccaatattttgaatgacgtaaccaatttttcgccgcaatttaacggggtctacattagcgagattttcaccatctaaggtaatcgttcctttggttgggttaatcatgcgattaatcatccgcatggttgttgttttcccagaaccagacgtcccaatcaaacaaatgaattcgcctttgtcgacagtaaaactgatgtcatcaacggctttgttatcaccgcgatagagctttgaaacgtgatcaaacgttagataatgtgtcataaggaacctcctattgtgatgattggaaatttattgctatataataactatgttagatacgtaacatgcaactgtcaatgaatacgctttactgataggtatcaaaaagccggtgtaacggaattgagaacgttacaccggccattaattaacctgttgatttaggacgataaagaataaagtgggcgattaaagcgagacattgataagctagcgctaagagacaaacggcgacccagccaccgaagctccaagcgagggcgccaaagaatgaaccggaagcaccacccatgaaataggcaaacatgaagacggtattgttgcgactactagtggcttcaccaagcatttggacccgggtttgattggcaacctgaccgcactggtttccgacatctaataaaacaatcccgagcattagaatcggcatgaaatgcccccagagtaagaataaaagataactgatggtcatcatgaataagccagtggcgataataaagcgaggtgatttagcatcggctaagcgaccgataattggtgcagctaaagcaccagccgcaccaaggattgctaatagaccaacggtaccactaccgagacgataggcgggactggccatatagaaaatgagtgtcgaccagaaaatactaagtgtcccaaacatgaaaaaaccgttgatggcggcttcccgtaacagccgctggtgcgcgataagccctggaattgaactgattgtctgccagtagcttggcccgttttttggacgggaatccttaggtaatttgagggctgccagaaggattaaaagcgcaatcgcaattgtagcgatgagatacacccaacgccaatgaatgtaactactaataatgccgctaaagcttcgggataggagcacacccattagaagaccactgagaatggtgccgagcactgcgccccgtttttgtggttgagcgaggacggctgcatatggaatgatgatttgaggaaccactgaggtgaggccaatcatcaaaccagtcaaggcaaagaaaatgaaattgggtgctaggtaagcggctaataaggatagtaaggataagccaagcatccgtaatatgagctggtaacggctcatcacatcaccaaacgggacaatcagcaacaagccaagtgcataaccgacctgtgtcaacattgcaacagtcccgaccgcaccacttgtaacgtggaaagtggtcgctacgagtgcttgaatcggttggatgtaatatagattggagacggcaacgccggtaataaaagccatcaaaaggattaatggctgcgtaaggactgttttttgcggagcactttctgacatactagggtggacctacctctctgaataacgttcttttagaatttgaagtgcattgtcgaattcaacttgggcttccggttcttcttcacgctttgcggctgtttctagaaagtctaaaatttcaggcgtgacatcgcgcactaattgactgagcgcccaagcagcagtgccgcgaatgacagggcgcggatcagtatcgatgagttcgagtaacttcggaatcgcggtgcggtctttcacgttggcgagtgcgataatcgcattgcgttgaagtggctttttgccacgccacgaaccagcaaggtgtccaaattgaagtttgaactgcttgttactgatggttagcacgggctgtaattcgggcatcacagattctggatctggctccatatcaggatggaagtggaagtcttttcctttattaaacggacatacttgttggcaaatatcacagccgtaaatgacactgcgaatttttggtctgaattcttcgggcatgaaccctttggtttgtgtttgataggataagcaacgcttggcattgaggcggccatcgcccattaatgcctgtggtggacagtaatcgatgcagcgcgtacagctgccacattgattggccatcggtgtgtctggttcaaatgggatgttggtaatgatttcaccaagatagacataagaaccgaattcgggtgtaattaataaaccattcaaaccgatgaagcccaacccagcacgttgcgcaacagccacatcgctcagttcgcctgtatcaaccattggcttaaaagtaatttcagtatctgaatcagcaagtgtttcgatagcgctgatcagctggtccatcttatcgcgcagaatatcgtggtagtcaatcccccacgaagcgcgggcaaaactaccgcgtttagcaccagttcgcgctggcttattgatgatttttgttggataggcaagagcaatcgcgataatcgatttaggttggtcgaaaattaaatctggataaaggcgttcttcaagcactttatgttcgaatccagtcgaatgaccatttgctttttgttccttaagacttgcttctaaataatcaaaaggcgctgccgatgtgaaaccaatcttatcgatgccgatggttttgctcgcctcaatcacttgttcttttaaagtgggcattcaaagccacgctccttttttaagtttcatgtgaaacaaatgggttatgctaaataaattttgcgcaggtcagctaagtcgtgttggcttaactggagatcgtgtgataaatagtcttgcaacgaaccattttcggattcaatcgcttgtttggcggtatcgaggtaatcttgatgaaccgttagtaatgactgataacttttgaacacagactggttctgtgttttttgttgtagttttgcaagcgattgggtcacgaaagcggcagaagcttgattcgttaataagtaatctgtgcgaatcgtttcttctggaacaccgagtgcactcaacaagaaaacagcgcccatcccagtacgatctttaccagccgtgcagtgaaacagtaaggattggtcctccttatcgtttgctagcaacaagtcgaaaaattgccggtaagcttgcttggagtgatcttggttaattaagtcgacatagacttgaatcatatgttcatgaccactttttggatcagcactgaacgttttaaaaagatcagcttctgatgccgtactagccgtttcatcaattttgaaaacgggtaaggattcatagattgcattggcagggaccttgtctggtgacttggcagtttcttcaggtgagcgaaaatcaacatcatagcgcacgccataatcagttaaataagctaaatcatgtggtgttaggtgggctagactagcggaacgtaagactttatgccatttaagggtccggccgtcttttgtttgatagccgcccaattctctaaagttatggcctttttcaagtggcaaaatgcggtgtgtcatatgcgtcaactccttatccaatgatatcaatattgtagcatatttaatgggcaatcaacttaacttgtcagtatgtggggagaaacagtatgataggggtattaagagtggagtgagcagatgattacgtattttgaaatgacacctgagggccagttggttgaaggaacctctgaaaaaagtgccgactggattcattttgaagcaccaactaaacatgagatgcaccatttcgctaaaaaataccacttaccagcggtgttatttgaggtggcccaagatatcaatgaagtcgcacggtatgaaacatttacaacggacaccggtgaagtattgacccatatttgtttactggtaccagttaaaacccatgattcagaagatcatgcggaatatattacgcggcctttttcgttaatcattagtggccagacgttattaactgtggggcatcaacagtccgagctcatcgatgaaatactcacgttagaaggcctggatggtcaaattgaaacggttgctctaaagagtgtttcggccatctatcaacgttatttagcggctttagcggtcgttgcgcaacagattgaacaattggaagaaaatgtacatgtttcgacacgcaatcggttgttgtatgcactcaagtctcttaaaaagagtgttgtctatttggatttagggcttaagagtaaccagcaaattattccgcaaattaaggcaagtccattatttgagcgcgtgtcaggacatacagacttactgtatcggattgacttgcagtttgccaagtccgataaggcgattacaacgtatcgtgagttattggcacagttaagtgatttgctttcagatattatttcaaaccgattgaataatattatgaagacactaacatcactctcaattattctaacggttccgacaacgttaggtggtttctgggggatgaacgtaccggtcccgctagccgagagtaagttagggtttctcgtgctattaggattgtcattagccattagcctttgtgtcggttggtggttaaaaaagaaagactacttctaattaaatgttcgcggaagcgcttcgcttttttgcttgaattgtttttccaagcggtatattcttaaagtgtaacaggtgcatatagagaaagtgagatgaacaacatggttcaagaatataaaagaatactcgtcccagttgacggctctgaagaagctgaattagcactaaataaagcagtgtgggttgctaagatgaatcaggcgcgcttggatattttgaacgttttggataccaagcaatttgcagggagttatagtggcatgctttcaggagacgctattttccaaatctctgaagatgcacagaattatctcaacagtttaaaatatgatatccaaaccaatgacggtttaaaagatgtcgagattcatgtgcggtttggtaatcctaagaatgttatcgcacgcgacttcccgacagaatatcaaaccgatttaatcatgatgggctctactggcttgaatgcagttgaacggatgttgatgggttctgtgacagaatatgttaaccgcacagctatctgtgacgtgttaatcgtcaagactgatgttgaaaatcgcccttatcaaaaagcaagtaagaaaaaataaataacaatcccaaaggctaaaaaggatgaattctttttagcctttttgcgtagttcaatttaggaggtggtaataatgacaaaagctgattggatgtatgattcacctgaattattggcgtattaccaaacagagtggggaaaaccggaacatgatgaccaacgcttatttgaactattatgtatggagttgtatcaggctggcttgagttggcggactgtattaaataagcgtgctgcctttcggacagcatttaaagactatgaaattgccaaagtagcacagatgacaccaaccgaaattgagcagttactgaccaatccggcaattatccgcaatcgtgctaagttgaatgcaacggtcaataatgcacaagccgtccttgcgttacaaaagagtgcaggaagctttgatcagtatctatggggctttgttgatggacagccaattgtaaatcggccccgaacttgggcggatgtccccgcaaaatcagagctatcgatccaaatcagcaaggatttaaaacggcggggctttcaatttgtcggaccagtcgtcatctattcattcttacaaggagctggcgtaattgatgatcatctgatgtcacagtaactttttggtgcagtcagtcgcgctaatattgcggatggtgtattatggagggatagaattcatttagattaattaaaggagtcccacatatgacacaggataatgttcgccaattagcagattggttagaagaaaacatggcagcaattgccgatcgcaaagtgcaattaaatccagaaacaatttttgctgttttggatgattttggcgttttaaataacccggtcgttaagtattttgatattacagaagaaacatattatcaatcagagtcagatcataaattaacgttatcagatgaccacaaattattaatcgatgtgaccgatcggattatggtgacccacgtggatggtgttttagctgaaaacaaagtcaactttgaatacagccacgaagctgtttatgaagatcaatatctcgttaaacgcgatttagaagtgttgacatatggtttggctgtcattggtgcagtggctgcaaccgttaaacataacttaatccaagctgatttgtctaaagatgctgtgttgagtttagctttggctgcgcaaaacatcgctaattggcaagcaaaataatccagtaaaggttggcaagttaaatgggagcagtgctagaattgcgtgatttttcgcaaaaatatcagcggcgacaactttttaaacgtctcaatttacggattgatcggcaagcttgtatcgcgattactgggcaaaacggcgcggggaaaaccacgttgcttaacgtactagcaggattgacgaatattgaacgcgggacactggagattgcaccgaagatgcggattggctatatggctgaacaactcgcaccaaatggactgacacctaagacttatttgcggatgctaggagaattagatcagtttagcaatcgaaatttagaaggtcagattaatgaattagcctatgaatttgggttagcggcggcacttaatacaccgttaaatcaattgtcacgcggtagtctgcaaaaagtgaactttgtgcaggcgattttgcggaccccagatattttattgctagatgaaccgttggctggtcaagatggaacgacccagatgcggatgattcattggttgaaagactaccgccaaaaagggggcgccatcattgtcggcactaacaacgcttttttaatcgaacagttggctactgaaatttatgaactagatgcgatgcggctattgccgattgaagaattaccgcagccggaagaaaaggtgatgcggttagaatttgcaactacaccgcgatcactcgcacttcccgctactttacaacagttagctttaaaaattgttgatggtacgcggtacgtcgtcttgtatgcaaatatcaaaaatagtgatgaattaattcaagcaatgttaaaaagtggctttagcctaagggggttacgttatgaagtcctttagtgcacagttacgtttgcatcagaaaatggtttttgataatgggaatttgtgggggcctttgctattttggatagtggccttattagtcaattatgcggtgcaaccacaagatttcgtcggcagcctcgctacattattaatgacactgtttatcttattgacgtggttgacctacagttacatcaatcaatttccccttcaaatggaaaaacttttaattttaaaattaaagaagcaatgccgtttttatctcagtttaattagctatctcatcttgttgggattattctttgtcctaattgggatgggaagcttggcaattacttacgtgctcaatgggcaccacgcttttggtcgaggacttagctggtgggattggctaggcgggaccttaatgttgacgagtattttacctgtttcagtaatgaccggtttgttctggcaacggcgaattttagtgaatcgccggatggccggtacgttgaccatcttgatggtggttctcggcagtttaggtgaagcgattgtcaattactggcatccctacctctatattctggggattttgccacccgtttcgaccatggcgcaactcttcaacacgttgggacacatttcgctagttgatattttattatcatgggcaatgagtcttggttatagcttggtcttattattgattgatcaattaattttaagaaggcgtaaattcctattttaagaagctgacaggctgctataagcggtttgacagcttctttttaagttgaattaagcggttacgggtgaaaaaatcttaaaaatgtggcatgattaaaaagaattcaaatcataaaaggagcttttataatctatgacaaaaattgcaatcgctggctcaggcgcaatgggcagtcgttttggttacatgttacaatcagctggaaatgatgttgtgttacttgataattgggcagaacacgttcaagcaatcaataccaatggcctgacggttgtagaagcggggcacgaacccgttcaggttcgaattccggctgctttgccaacggatattaaagaagttcaagacgtcattattttattcacaaaatcgatgcagctagtcgacatgttacaagccatcaaacccttaatcggtgctaagacaaaagtagtctgtttattgaacggtctcgggcatcccgaaacgattgaacaatacctgcccaaagaaaatatttttgtcggcattacactttggacggcggggttaacgggaccaggtgcgattacattaacaggctctgggaatgtcgaattacaaaatgttgatccagatggcaaagaatcggcacaagcattagttgccttgttgagtgcggctggcttaaatgcgcaatatagttcagatgtactcttttcaatctggcgtaaagcctgcgttaatgggacactgaacagcttgtgtgccttgttagactgtaatattgcacaattgggccaaaccccacaagcgcaacaactcttgcgttcaattgtggcggaattctcagcggttgctgcaacagaagccgttgaattagacattcccacgacgattgcccacatcagcaagatgtttgcaccagaacaagcaggtggtcattatccttcaatgcaccaggatttagtgcaacatcaccgcttaaccgaagtggattacttaaatggttacgtggcacgcaaaggcgccgaaaagcacattgcgaccccagtcaaccaattaatcacgggattaattcatgccaaagaagcattattgattaaataaacgaggagtcttaactaatgacagaaaaacgccaattaaatatcgaagttgaatcaatgcactatcaaaaattattaattgctatcgatgatgatgacacaacctcatccaaacgggcctttaactatgcttgtacgcttgctaaggcctatcaaattccattagggattgtcagcattttggaaaccggcgatttgaacatttatcaatcactctcaccaaacgtggttgaagggcgccgagaagaaatcgcagccgatctagatgtttatgttcaaaaagcgaaagaattcggggttgaagatgtgacgccgattttaaatgaaggtaatccaggacacgtgattgttgaagaagtgattcctagtttccaaccagacttggtcatctgtggttcaaagacgaaaccatctaaacatttaatcgggacacatgcgagctatttagcgaaatacgcgccatgttcagtcacagttgtacggtaaattaagtatttggagatcagacgaatgatagaatgtacacaatgccatattaaatatgggcgtaaattgcaccaatgtcccaattgcggtctagtgcaccaatcaacgcaaacaaaacagcaaacatcgctcctgcaacaatactatcaatttttagcgcggagtttaaaacaaccgctaaaggtgcaatggcagtgggccaacctgtggtttggcttagtcacgtttggtctggttatattaatgaatactgcaacggcaagtttgctcattgccagttggtcagaacaaattggtgcggttgctggggtgatggcgtcacaaattgtcttgcgccaacggctaaacttattaccgcttgatatgaaggcactcggtggacaactatttattctggtggttgttttgggaatcggatttttactcaagcgttacttattgaagaagacgacaaccaccttgcgcgcgtatctaacggagattagtgcgtacagtgggataaccgttattttagcattagctgcgctgttggctgctctatgtttcgggatgaccgccatctggttcgtcttaatcatggttgcagtgatgtacgtcagtttgaacattgcggttgggattagtttatttcaaactcgatgggcagcttttgatcgcgtctatgctattttattatttgaaatcttaacccatgttgtcttggcaattggcattagccaaatcgtgattttaaacctactaacaggactctaaaaaataaaagtgcgtattttggtacactttttcaaaagaggtttatcattagagttgtaaaaaagaaatgggaggtttttaatatggcagcagctgttgaaaaaacattggttttagatatgaagatgtcagaagcatttgattggagtgacgataacacaatcgtccgtgatgctttgtgggatcactatatggaagccaacggccggaacacggataaaaccgttgaggcaatgaaaccctatcttaagatgagcgacgcggaagttagagaaaaggcagaagcgcttttaaaataaggcaataaaaaaagacccgctaatcattgttgattagcgggtcttttttgggtaatcctcaaagccaacccgttcgactcagcactctaaacgtgcttcctgtcgcagtaatttccgcttaatctaaaaataacataaatcctaaaacctggatttatgttatttttgaattaatgctcaatgactaagcgcgacagtcagcactctaatcatacatatattctcttgtcattgggaggtctcttgcgctggggccttttgatacgaggtattgaatgacatcaatgttcccagattcaaacgatgaggcacatgcttggagatagagatcccacatgcggacgaattctggacctgcttttggtaaaatgacgtctttttgggcgttaaaattagcagtccagatttccagcgttttttgataatggcgccggaggggttccatgtcggcaatttgtagtccggcattgataatgtgttgtgtattttcaactaaaccgggtacatagccacctgggaaaatatacttattaatccaggcattgcgcgcaccgccttgttgacgggtaatcccatgaaggagggcaaccccatcatcagtgaggtagtcagcgatatcttggaagtaggcaccaagattttcttcaccaacgtgttcaaacatcccaacactggtaatgtaatcgaatggggcgtgtttgagttcgcgatagtcaacaagttggacgctagcaacatcgctaaggccctcgtcattaatccgttgttgaacgaaatcatattgttcctgactcaaggtaatcccgaccactttgagatgatattctttagcggcggttaacatgagggtgccccaaccacagccgatgtcgagcaatgttcggttaggttgtggattgagcttgcgtaaaatatggtgcactttattaatttgtgctgtctctaaatcatcagttggtttttcaaaataagcacatgagtaagtcattgttttatccaaccaaagttggtagaagtcattccctaaatcgtaatgactttggatatcttttttacttgccttttctgaatgcgattgttttggaatcagatgaatgtagcgactattacgcatgaaactgtctgcgctagtgtaagccgccgttaatagtttttgaagtggggtatctgttgtattacttgtcacttcaaggtcgccagccatgtacgcttcgccgagggctaatgatgcgttgctggacaattgtttgatgggaatcgcttttttaaaagtaatcgctacttcaggctctccagaaccataggtttcggagctgccgtcccaatagttgacggtaacagggaaatcaaaagagtgttgtagtagtttcttataaaaagttttttctaacataccgaaaatcctttctaggtgtaaatttgaagtaccagagtagtatacgactatttttaaaaagatgtaagttgcaactatcggaattccagaatatccaattagttcgaagtgttgtaaaataatgatatagaattgccataggaggaaattgcgtgagtttatatcaaaaatttgtgacgaatcagcagttaagacgagttgtagtgctcttaacgttgattggggtcatctatgtgtcacgctcgatgatgaatatcattttgctgacgttcatctttacttttttagtgactcaattagtacgaaaggtccaacagtattcaaaaattccgcccgcagctgtggttgtgccgctttatatgttggtgatttttttagtgtatctagcagtaacgatttatgtgccacagattgctaaacagtcaattaaattaggcgagagtgtctataatttctaccaaagtccatcatttgatgcgaatcaatttatgcgaaccattggggattacatgaaacagttcaacttgacggatcagttgaaacacggtgtatcaacaatcgttaattacatcaccggaatcggaacaatgggcgtcacaattgtcttatcgtttattttgagtttcttttacacaattgagctagaccgattaccgcagtttggaaaactctttttgaagagtacttacggctggttcttccaagatatcatgtattttgctaaaaaattcgtgaatacctttggcgtggtaattgaagcccaaatcttcattgcaattgtgaatacagtgttaacaacgattacgttaacggtaatgaaaatgcctaatattccgagtttagccatcatgattttcctattgtcgatggtaccggtcgcaggagtcatcgtttcatgtatcccattgtgcattatcgccttttcagtcggcggaattcagtatgtggtttatatattggtgatgattttagtcattcatgccctagaagcatatgttttgaatccgcgatttatgtcgagtaaaacacagctgccaattttctttacatttgttgttttatttgtagcagaacgtttcttaggaacttgggggttaattgttggattaccaatctttacgttctttttagatgtactaggtgtgaagaccattcaaaaatcgggaaaaaaacaaaaaaaagcggctaattgacgcggttagaatccgcaacaagggtggccaattggttaaggtcgatttgcaattcgacagcaacaataaataatgcttttagtgatggggcagcgcctttttcccaccggaagatcattgagctactaatcttggtattatattttgcgctgagtagatcggcgagctgttgcattgttagattcttagcagttcgcttatcgtgtaataattgtccgaacatttagcaccgtcctttatcacgcgtttgacttataagtttaattatatgacaaatgacgtcaataagtgaacacttgggactaaagtttttaattgacagagttcttacattatcgtaatattcctaatgtggaacgggattgataacgtttcttgggggtgctgaatgtggcagaaaaattatttgttctatcaggttatttaaagggtcatgatttgaaacagcaagttgttgctgatgtattgggcaaaacattaacgacggctaatcgtaagattagagggaagattccatttaccgtcaaagaaattcaattactacatgaccgcttgggaattccaatcgacgtgtttttttaagaatagttcctaatcaggaactaagtaatcagttttaaatgaaccaaataaaaataaccctgtcgactgaaaatcgtcgacagggttatttttattggctattttgctttaaggagttctaatttaccttgaacaatcatttcgcaaagatcaggataactgataccaagcacttctgcttcttgtggaattaatgaaagtggcgtcatcccaggtaatgtatttccttcgatcacgtgtaagccattttcaggactccagaagaagtcgatgcgggcgtagttcgttaagccaagtgcttgcatagcatcaagtgccatttgtttcatggcttcgtgcacatcatcaggtaaatcgtttggtggtgtgacaaattgagtggtatttccagtcacgaatttgtgctcaaagtcataccaaccgtcattaacgacgatttcaatggcaggtaatggttgaccattaatcacgccaagtgagaattcgcgacctttaatgaattcttcgattaaagcctcgcggtcgaaacgaagtgcatcttcgacagctggttgtaactcagcttcgttgtgcacgatatgcgtcccaacacttgagccaccgttacttggttttaccacgacagggtactcaaatgggatttctggcatgggttggtcgcgataagcagcgacaaaccgagcagttggaatttggttatataataagatttcctttgaaacctttttactcattgtaatacctgctgcgagtgtgtcactaccggtataaggaattccaaagagatcgagaaccgcttggactttaccgtcttcgccatcgccaccatgaagtgcgaggaagacaatatcagcagttttacaaatctctaagacattcgggccaaagagttgtgttgaaccatcagtacgtaatgcgttgatggcgtcgtctgttaaaacttcgtcgctgatgtcgtaatctttttcaacaggtgttgaagaataaagatcatcgattgatgcgacgtcgtgcaaatcatttcctaagaaaagatcaacgaaagcaacgtcatggcctttcgtttgtaatgcattggtaattttgtgtccagacgttaatgaaacgttacgttcggtactacgcccgcccgctaagacaacaattttcatatgaacctacctccgaatatttttggaaccttaagtatagcacaaaaccatattaggcgggtatcaaaaagctgaaaaatcagtggtctagtttaaaaattggcactcaacaacgtcgagtgctaattacttgcatttcataattaacggactagaatagagttgtaaagattaagaaaggaagttttagagatggcaaacgaattaatgaatggtcgtcaaaattggctagataattttggtggagatgattggttcaagaatttcggtcagcaattattggcaatatcgcctgaaacggacaacttactcaaaacagatgttaaagagaccgataaggattaccaattagcggttgatttaccaggactggacaagaaagatattcacgtggattatcaagataatacattgaagattagtgctaaacgtgatagtttcgctgatcatagtgacagtcaaggcaatatcgttcaaagcgaacggcattatgggcgctttagccggcaattctacctacctggtgtcaaccgggatcaaatcgatgcgcaatatcaagatggcgtcttacaattgatgctaccgaagttaagtgaatcagaccaaccaacgaacccaattgaaattcgttaattaaaaaagcggcaccaaccataaaatggttggtgccgctttttgagttatagaaaaagagaggcgtaaaacaatatgagacctgctacaagagtacaacatttaaatttggtgagtaaggcaatccgccgctgttgaatgggtgaatcgagtgggagtatgacgacttttaattcattttcaggatgcgcttgtagataagatttccaaaaagtatgctgtgcttgaaaagtcggcaacttaaggtagagaaacgcgataaaaatgaatgcactccccaaaagacggattgcaatgttcagggcatctagatagagcgctgttagacagccaccgattgataaaaagaataaaaggactaaccaagatgttaaaggaacagcttgcttgtaaaaggatgcgttgaaataagcttgtttcattgattgttgcgctttgtaagcttggtcatccgtgtcaggatattggtccaagaaattttgcttgagtgttggctttagcatattgagacgcacgataaaataagatgaactgatagctaacaggcaaccaataacagtgagaaaaaaggcttgatttggggacaaaataatacctccttcctaataataaataattgtagtatagcaaatatttttcaactattaagatttaatcagtaattttaatatttcattgagagataatgcgctttctaaatgaatacggtatagttaaggtaatgaaaagtagggggttggggacgtgctgactttatcacatttatccaaaagtttcggaacgatgctagcggtcgacgatgtttcatttacggttaagtcgggcgaaatattaggcttaattggtcaaaatggagctggaaagacaacgacctttcggatgatcttgaatttcatggcaccagatacgggaactattctctggaaaggtcgcgcgtttaccgctgcggattatgaccaacttggctatttgccagaagaacgaggattgtatccaaagatgaccgtggaacaacaaattttgtactttgcacagcttcgtgggcgcagcatcgcagacatcaaaccacagattgatgagtggttggtgcgctttggggtgaaaggtaagcggactgataaaatcaaggatctttcaaagggaaatcaacaaaaagtgcagttgattgcgactttgatccatcaaccggaactcattattcttgatgaaccctttagtggactcgatccagtgaatgcagaacttttagaagaaggtattttatggcttaaagaacaaggttcagcaatcattttttcgagtcatgatatgacgaatgttgcgcggattagtgaccggattgtgatgttgcgcgatgggcaagtggtgctcgccggtacaatcgatgaaattcggaatcagtttggccgaacgcaattattcttagaagcaccgttagcacgcgaaactttagcaaatatcaacggtgtttcacgtgtaacacagcacgggcagcggtttgaattaactttggcagacgaaacggttggtaaaacgattttcgacttagcgacacaaaatggctatatcctagagtttagtcaacaagcaccaacgctcgatgaaatctttagaatgaaagtggaggaaggccatgtttaagtttaaggtgatttttaaacaagtatttctaaagaatattaaaagcccagcgtatctaatcatgattttgatgccaattgtgatgctcgggattacgtttggtgtgagtcgcttgatggatcatagcaaagaacccgttagaattgctgttttggcgccgcaaccagcagaacagagtgaattacagcagttaaaaggtaaaacatatcaaatcgatcagcagattacgactcgggaacaagccaccaaagcgctccagaaagagcgaattgatggctatttgttgttgagtgaggaaaaaggacagacaatcagtcgctactatgaacgaaaagatagtccatcatttgatgcgagtgtcttagagaatcagttaaatcagattcatttagtagctttggcgcaacaagcaggcgttgcacctgaacagatccagaaattgatgacgccaactgtcattgcaccagtgacggttaattaccagaatggtcatgaaaagatttcccaggaaaacactaaagaagtgggccaaattatttcaattggaattacggtcttaatgttcatctttatcgtgaattatgctggaatgattgcccaagaaattgcgactgaaaaagggtcgcgaatcatggaaatcattctatcaagtgtttcgattgaaattcaatttttcgcgaagattgccgcgatattagccctattactcacccaaattactgtctatattttagttgggattgtcgggtttcagtttttgaaacagcaactaccgttagcagagttattgccgattattcgtcgtgctttggttgcgccagcaatgtggtatgcaggagtctttttaattattggggtattactctacaccgtattagctgcaatgttaggcgctgttgtgtctcgaatggatcaggtacaacaagccatttcgccattgattttactgggcacattaagttatttgggtggctttgtactggcatcacagaccgatattccattattgcgggcggtgagctatgtgccattgttttcacagattatgttacctgtgcggctggcaaacggtgatgttggcgcgttcggggctagcatgggactcttcatagccatggcgacactaattggactgacttatttagcattaattatctatcgcatgaatattctagtttattcggataaaggtgtttttaaagcattaattgccacctatcagcaactcaaagaatcgcgccagtagaagatttttacaactaattaaagcggattgatggtatgatagagccatgtgattttagtagcaaggagagcgattgaacgatgcaaaaacgatgggtaaaattcggattggcactcttaggggtgacactggtattggcaggctgtcaaagtaagccagcggacaaagaaacgttggtcaaaaagccctatgaaaaaagtgattactatctcggaacgatttgtacattgcgaatctataataaagacaaggaagccgtgctagataaggcttttgcgcggattaaaaagtccgaaaatcaagcaacgttaaccaaatcaggttccgaattggataagattaatgataacgccggtgttaaacctgtacaggttagcaaagatatgtggccactaatggaaaaagcgttacattatagtcaagaatcggatggcgcgtttgatatggccattggtgcgatcacagatttatggcaaattgggttaccaggcgcgcgggtgccagcacaagcagaaattgaccaagcgttaccattagtcgattatcatgacgttgttttgaataaggccaaacgtacagtttaccttaagaaaaaaggcatgcgacttgattttggcgggattgctaaggggtacattgccgatcaagttaaacaagtttttaagaaaaatggtgtgacatcagccgttattgatttaggtgggaatgtgattgttatggggcattcaccattagggaagaacaaaccatggacggtcggcattcaagatccgaaaaaggcgcgtggagaatcagtcggtacgattaaaggccgtgatatttcggttgttacggcagggatttatgaacattatctaaaaaaagacgggcatacttacatttatctctttgatcgccatactggctacccatatgaaaataacctagcgagtgtcacaattatctcgcctaaatcagtagatggagatgccctttcaaatgctgtctttaataaggggattgtcgaaggcatgcagctcatcaacaacaaaccgaagaatatccaagccatcatgatcacaaaagataataaaatctatctatcaaacggtttgaagaagacgtttaaacttaaccaagattcaaattatcaagttgaaaaacaattaccaacgaaatagccgctaaattgcggcttttttgcaattatgggggtcaaagcattaacggaaaaagtggcaaaatgttaaaattgggaaagaatctgcttttgaggaggacaatgatgacaaacgtgcgaatgcaagatgatttttatacggcagtgaatcaagaatggttaaaaacggctgaaattccagcggataaaccagcaacaggcggctttgtcgccttggttgatgagattgatcagcaattaatggctgattttgctaagatgtcgaccgcaaagaacgcattgttacaacattttctagattattacgaactagctgcggactttcaaacgcgggatgcactcggtatgaaaccgatcctaccaatggtagcccgggtgcaatctctcgatagtttagcaacttacaatcgtgggttagctgattgggtactttccgggttaccaacaccatttggcttatctgtcgatgctgacatgaaagacacagcccatcacgcgttgtatgcggaagctagcgacttaattttgccagataagacctattatgaagctgacaatcccaatgctgaccatttattggccgtctttacggatatgatggttcagctcttgcagaaaattgggattgcgcccgttgatgcaacgaagacggttaaattagcgttggcatttgatcggtcactggcaccttatgtgaagagtgccgaagaagcagcggattacacgaaactctataatccacagcctttgagtgattttatgcaacaacaaacgacgcttgattttccacgtttatttagcaaggtgctacctgttcaaccggaaaaaattatcgtgacggaaccgaagtattttgcgcaactgagtcagcttgtgacagacgccaatttcgaaacgttcaaagcgtggctgttagtcatgacagttcgtagttggagcggttatctgaatgaagaggcacgccaaattagttcgctctatagtcgtgcgttatctggtagcaaggaagctcgtccacaacaaaagagtgcttactaccttgccttagggatgttcaatcaagttgttggcgattattacggtcggcaatacttcggtgaagcagccaaggccgacgtccaaaagatggtccaaaaaatgattggtgtttatcaaaaacgccttgaaaaaaatgactggctaaccgaaaaaacacgccaacaagcgattgtaaaactcaaccaccttgggattcatgtcggttacccggatcagattgcccctatttttgcgaagttggtcacagtacctaaagcagaagatgggacattatttgaaaatacagctgactttattcgaacgattgaaacggaaaattttgcgaaacttactcaaccggtggatcgtaataagtgggaaatgggcgctgccacagttaatgcctattattcaccttcgaagaatatcattgtctttcccgcggctattttgcaagcacctttttacagtttagaacaaagtagcagtgctaactacggtgggattggtgcagtgattgcacatgaaatctcacatgcttttgataataacggtgcgcaattcgacgagtatggcaacatgcataattggtggcaagaatcagatttagctcacttcaagacactttcggaagaaatgattgcagaatttgatggcctagaatatgcaggcgcaacagttaacgggaaattaactgtctcggaaaacattgccgatgcgggtggcttgagttgtgcccttgaagcagccaaagaagaacctgatgttgatttggcagccttctttgtcaattgggcaacgatttggcggatgaaagctacaaagcaatatcaacaattattgttaaatattgatgttcatgcaccaaacgcgttgcgggccaatattcaggtccaaaacttggcagccttttacgagacatttaatgtaacgaaagctgatcagatgtacttagcacccgctaaacgggttgcaatttggtaaattaaaaaggtgcgccacaattgtgacgcacctattttagtagtgatgggggataaagaaatgtcagaaaaaaaacgcatgattaatggtcaaatttatcgggcgaacgattcagaattgcgagccgatatgaaacacgcgcgcgtacttactcggttgtttaatcaaaccactgaagaacaacaagattaccgacgcgaattaaccaagtctttatttgcgaaaagtggctcagatttatatattgagccaccatttagaactgattatggttgccaaacacgcattggtgagcatgtgtatatgaattacgattgcatcattattgatgtagcaccagtgacgattgggaaccacgttttctttggacctcgtgtagggctctacacagctggtcacccaacgacggcacaagaacgccgggatgatctggaatatggtaagccaatcaccatcggggatgatgtgtggattggtggcaatacggttgttaatccaggcgtgacaattgggaacaatgtggtgattggttctggatcagttgtgactaaagacattcctgataacgtgattgcagttggtaatccatgtcgggtactccggccgattgatgaggcagaagaggcctactgggcgcagcaaaaagcaagttattttgaagcccttgctaatgaataagtttaccgagtagtgttaaatggagtagtcatcactaacaaagcactaagctaaatatcagcaaactaccgagaaaaagccgctagtactctataaaaagggttctagcggcttttttaaatgtttggtggatcaaactggcagcaaatactattcagaatgggtcaaaccgtaataagggttaattacgattggttttcatcagtactgcggtgccatggcttttgtaatgcttggacggcttgagcgatatctgtggcgtgggtgattgctgagataacggcaactccatccacggtagtctttgcgacttgagcaacgttttcttggttgataccaccaatcgcaacaaccggtagttcactttgctgcgttaagaaacgcaagcgattagtgccaagtgctggtttagcatcttctttggaattggttggaaaaattggaccaatgccaatgtaatcaagtatcggttgattatgactttggtgaagttcttgttcagtgtggcaagatagaccagttattaagccgtgtgctttggccgtttcaattttatgccacgggtgatcgctttggccgacatgaataccatctgcattgatttgaagtgctaaatcgagattgttatcgataataaatgggacttgataatggcggcaaagggcttgagccgctgtcgcatactttaaaatcgcatcggaatcttgcagactaccagcacctttttcacggaattggaaacaggtaatgcctgcttgtagtgcttgttcgagaatgtttagaaaatcatccataccggtattttgggtacccgctaccaaataagtttggaacatttcccgggaaatgttagtcatgatgaacctcctgataagtccagtgattggttggtccgtggccgtgaccaacagcaatcggattagcaattgcggcttggataaaggctttgctaatatgaattgctgctttcaaaggggtgcccttagctagctcggcggttaaacaagctgaaaacgtatctccagtgccatgtgttcgtttagtagcaattcgtggtgtagttaaccattcatcttgtccatcagcgtagaggacgtaatcggcggcttgtgattgatagtctaaatggcccctttgataatgatattcttggcgcccatttgttggagttggtgggccgcttgtttgaaatcagctgttgtctttatgcggctgcccgtgagaacttcggtttcgggtaagttgggtgtcagcactgtggctagcggcaataattcagtacgtagggtatcgatggcatcgtcggcaagtagctgtgcaccgcccttggcaatcattacaggatcaagggtgagcggcccccaatcataatggcgtagattttcagcgaccgttgcaacatgttcagcatctgccaacattcccgttttgcaggcacgaattttaaagtcagtagccaatgaagcgaattgttgattgattagtgatagtggtagtggcagactgccttgaactctgtgttctggtttgatgttgctaacattaatgatatcgggaatttcttgggtggtgcgaaatcacttgcgaatggttcagctgtgattggtaagacagggatgtatcaagctggtttcttcccagtcatgatgttcggcttacctgctggggcttacgcaatctacaaaaatgctcgtccagaacgccgtaaagcaacagcttcattgatgttagctgctggttttgcgtcattctttacaggggtgacagaaccacttgaattctcattcatgtttgttgcatggccactttatgtattgcatgcagctttcacagggatttcattggctgttgctgctttcttccactggacagccggtttcgcatttagtgctggattagtcgattatgttttaagtttgaaaaacccagttgctaaccaaccgttgatgttattggttgaagggttggtcatggcagttatttactactttgggttcaactttgccatcaagaagtttaacttgatgacaccaggtcgtgaagcagaagatgctgttgatgaagatactgctggcgttgaaacagacgctactgatgataaattcatggttcaagcaaaacggatctacgctgcaatcggtggcaaagacaatatcaaagtgattgacaactgtacaacacgtcttcgattacaattagaagacactgccaatgttaaccaatcagcgattaaagctgttggtactgctgggattaacgttttagataaaacaaacattcaaattattattgggacagaagtccaatttgttgctgatgctttaaaagaactttataaccacaatacgccaatcgcaacaagtacaccagaacaagctgccgcaccagttgaagcacctgttgatagcgatattaactcaggtgaaacagatgttttctatgcagttgctaatggtgaattgatcgatattgaaaatgttgatgatccaacttttgctcaaaaaatgctcggtgatggctacgctgtcattccaacagacggcaaaattgttgtaccagttgatgggactgttatgactgtgttcccaacgaaacatgcaatcgggattaaaacaacgaacggtttagaagtcttagtgcacatgggaattgatacggttgaattaaacggcgcaccttttgcagtcgctgttgaagaaggccaaacaatcaaacatggcgacttattagcaacggttgatttgaatcaaattactgctgctggtaagaagacggcaatgatggtgatcattaccaacatgcccgctgttgattacattaagtttaacgcaatgagtaccacagttgctgcagacgcagttgccttaaaagcaacaacgaaataatgaataaataaaaagccccgcaaactgaagtttgcggggcttttttgtgttatttagttaaataatcctttgaagaaattagccatgctatcaaagagtttttgaatgaagttccgattgctttgggtgttgagcttattgaagatgtttttcgcaccactttggatattattcattaacttaccggcttgattcttgaaatcatccgaatttaaagcaccggaatcttggattttaacgagaacattaatgatttgttgtttttgattattgttgatgatgttggtgaggttgttttgttcgagttgattattgacgatggtagtaatttggttaacagtcagattattgcccttacttgccatgtcttttttggcacctgtgacggcattattcaattgggaatctgaataaccatcggtgcctttattagcctgtgtgatatcgctgagggtgctcatttcgtcttgagcagcagttacttgcgcttggttgagtgaatcgccattttcagcgaaagcggcgtaaacgccagctaaggcgccagagccatcgattggaatggcggaagtcacgtaaattgtcgcattcgtgacgccggcggttaaggccgcatttttatattggttggctgtaattgtggtgatgttgttatggccattaaaatcgataattttaacattgatgccggtattgctgtcatttttttgaattaaagcacttgagtagacacttgagttggcgttaaatgtttgttgattttgatcaagatattttacaagtgtggaaccggtcactgttagttcactgacatctgtgacattcgcggcattttccagtgtcttgagggtatcagctttttgggtgctagaaaggctagtcccaagagtggcaacgggtttgtcccacgatgtggtgctgtcggcaaaggccggttgtgcgctcagaccgataatagcagtaaatgcaatggggatgaggaacttcaatttattaaacataagcaataatcctttctcaaagcgaatgatacctttagtatagccaattcaagccgtaaagtatccgattttaactatttttaggaattaaagatgattttaaggcttttttaaggttgctgagtggggtgaatgctactaatgacccgtgtatgggttagtttctcgtagaataattgtggtcgtttagtcacccaacttaataagaagttaccggtgaataacagtggtggtaagagtgagagaccgataataaagagatagacgtcaaaatgttgttggccactagcaacagcggcatccagggtgacgcgccagagttgaaagctgggaatgacgatgaaaaataggagtagctggcgccagaagatcgcccaacggtgatgatggtcagcgacaatctgtagttgcaggagagattgaccaggtgttttgccacgccaaaaaacggggagcattaagaagtaagcaccagttgccaggcagtactgaagcatttctgaatgaatggtgggtagttttagtaatcgccagataacagcaattgcaaatgtaatgatgcctaacgcacagtaatcaacggcaagtgccaataagcgccggaagtagcccactttttgaccgcgcgcataggctgcttgatccaaactttcacgagtgggtaagaaaaaggtgaccaagggctggagataaaatccaagcagtccgccagagatgttgatcaataagtcatcaacatcaaataaccgataagggcgaggataaataccatacagtccggaaagttgcgtgagttcaaagaatagggataacgtaaaactaagtaataaggtctgtttgaaagacgttttaaagaagtaacgtaaataaatgccaaatggaacggttaaaaagatgttaaacaacggctgaatggttgccgcttgtttaagtgttgcgaggtatgaactcggttcggtccaaacgaaatgggttgagttgataaactcccggacaaacgtaaagggaactaagttatagcgaggggtggttaaatgagcgaccaccgagcgtgggggaggggaagaataattaagcagtaagcggctaccaagtagaacatgaagctgtagagaattacactacgcaggatggttagcgaaccataacgatgatagtggtaaactaacagtggaacggttaagatgattgcgacgaatgaaaaggcaattgccgcagtaatgatattgctgacgtaaaccatgatgagctcctttggtgttagatgtggttatattgtattttttaatgaacgcctgtcaaaacagggatcattgttcgttatttacgttcgtattttatcggttatatgtatcgttaagattttactgaataaaggctgattagagattttaaagttcgtcttttatattgattttgagataatttgttgctacaatagtttttgtgagttttagggtttaaatagcggatctgaagacggattcgaatagaggagtatgtttatatgacatctgtagtagttgttggaacacagtggggcgatgaaggtaaaggcaagattaccgactttttaggtcaaaatgctgatgctatcgcgcgttatcaaggtggcgacaatgcaggtcataccattcagttgggtgacacaacttaccatttacaattaattccatctgggatttttaacagtgacaaactcagcgtgattggcaacggggtcgttgtaaatccgaagaccctcgtttctgaattgaaatatttaacggatcaagggatcaacgtgagtcaattaagagtatcagatcgggcacacgttatcttgccataccattctaaattggatggcttacaagaagcagccaagggtgatcaaaagattgggacgactaatcgtgggattggcccagcttatatggataaagccgctcggagtgggattcggattgccgatttattggacaaggaactctttgcaactaaattaaaacaaaacttagacgaaaaaaatgcgctctttactaaaatctacggtgctgaaccacttgaatatgagacaatgtttgcagaatattatcaatatggtcaagaaattaaacaatatgtttgtgatacttcagttgttttgaatgatgttttggatcaaaaggggaatgtcttatttgaaggcgcacaaggcatcctcttggatatcgaccaaggtacgtatccatttgtgacatcatcaaaccctgccggcggcgtttcaacaggttcaggagttggtgcttcacggattgacgaagtggttggggtggctaaggcttatacctcacgcgttggtgatggcccattcccaactcagttagatgatgaaactggcgacttcattcgtgaagccggtcatgaatatggtactgttactggtcgcccaagacgcgttggctggttcgactcagttgtgcttcggcattcaaaacgagtggcgggtgtgacccaattatcattaaactgtgtggatgtcctaactgggattaaaacattgaagatctgtgtcgcttacgaattagatggcgaacaaatcgatcgttatccagcaagtctccgcgaattagaacgttgcacaccgatttatgaagaattacctggttgggatgaagatatcacgggtgctaagacgctagaagacttgccagctaatgcgcggcactatgttgaacgaattcaagaattagttgatttaccattagcaacatttgctgttggtccagatcgtgaacaaacaaatgtcttatctgctatctggtaggtattgctgaaaaagagtacaaaaaaagagaatgcaaagttcgttttctaaacgtgtcgttaaacacgccaacaaactttcattctcatgggtttggcaccagtcagtattatacacacattaccactaaaaagatagtgggaaaattagttggtttagaggagtcgttatggaaagagtaagtcgcttcttcgggattgaagaacaacattcaacagtgcaacgggaaatcctagcaggattcaccacatttatttcaatggtttatattttattcgttaacccgagcgttttaggtgattcagggatggataaaggggctgtttttgcagccacagcattagcaagtgcgatcgggtgtttcttgatggggttatatgctaaatacccaattgcaaccgcaccagctttagggattaatgcctttttcagttattcagtggttatcgggatgggtgtgtcatggcagacggccttagcgggtgtatttgtggcttcattaatcttcatgttggttactgtctttaagctacgggaaatcattattgatgccattccgcggaatatgaaactagcgatttcagctgggatcgggatgtttgtggctttcatcggtttacacggtggtggcttgattgttgcgaacaaatcaaccattgttggtttgggggacttctcgcaagggacgacttggttaactgttttcggcttaatcattaccgttattttaatggtccgtaaagtaccaggagcaatctttatcgggatgcttctaacctcaattgtgggagccatcagtggcctaattaagttgccaacacactttgttgcagctgcgccaagtttgaaacccactttcttagctggtttaaatcacattggcgatatcaacaccgttcaaatgtgggtcgttgtactcactttcttattagtgaccttctttgataccgccgggacattggtcggtttagctgaacaagccggcttcatgaaagataacaagatgccccgcgttgggaaagctttggtatcagattcaacggccatgttagctgggtcattactcggaacatcaccagttggggcctttgtcgaatcgtccgctgggattgctgttggtggtcgaactggtttaacggccgttgtgacgggtgtgttattcgtcttcagtttattcttctcaccattattgacggttgtcacgtcacaagtgacggcccccgcattagtgattgtcggtgttttaatggctcaatcattgaagaaaattgactgggaaaaattagaaattgcaattcctgccttcttaatcgttctaggcatgccactgacttacagtatttctgacgggattgcattgggctttatcgtctatccaatcacaatgattacagctggtcgtcgcaaagaaattcatccaattatgtatgttttattctttgttttcgtggtctttatgtacatcttaaacgtaaaataaacaacaaacgcacagccgaaagtttcggttgtgcgtttttatgtgttgctgttattaattgcgaatcacaaggatttagagccggtaaatataaaatagtgtgttacaatagtcgtaaatactagtgaagggcttaaactgttatgtaaaaaaagacaagaaaccgattaattaatggcttattagccattctgttagtggttggattagtgttggtcttcatcaatccaatccgcaaccaactggttaaaatgatggcgcatcgtcagatggacgtcacagctgctcaaattaagaaaaaccaacataaaaaagcgagctttgattttgataaggttgattcactcgatacaaaacagattgtgaatgccgctattaaaggcgatgtgattgtcttaggaaaagttgcaattccaagtgtcaagatggccttgccagtcatgaaaggcgtctcagaggacacaatggctcaaggtggaggcacaatgaaacctgatcagcaaatgggtgcagttaacaattatgctttagcagggcattctttccaaaacatctttctgccacttgaaaatgtgcgcgtcagcgataaggtctacttaacggatatggaaaaagtctacacgtacaaagttgattacaaagcttcaatcagtccatacgacgtaaaagtcatcgatgatgtaccaggtcgtaaaatggtgacactgattacctgtgataaaacggtccgcagatggtgtattcaaggtgaactcgtgaagacccaaaaggcaacaaagaaaatgttagctgttttcgggaattaacccgggaaataaaagactgccagtgagttgaaatgctttaatagcagggatgcaacagatttgttgcttgtttttgtgggggttaattcgttaaattaggtttatagcggaggtggcaaaatgtcagttgggaatgctttaaaggaagctaggatgaatgttggggtgacgcaggaacaagttgcacagaatttgtttgttacacgtcaaacggtttctagatgggagcaagataaaacattaccaaacgttcatgttttaaaaacacttagtgtgctttatggtattccaattgatttcatgtctggcattattcattattgggcttgtgctttatccagtcgctaagaagatatcaggaatggttgttagctttggtaaacaatatgttaaatataatcaaaaggctctatacgcataaacataaaaacgtcatctattggatgacgtttttatttgaaaatcattggaatgaggccacctactaagagtggttggagataaatttgaagaaactaacgcgcctaaattattcaatgaattatcagcggatgaacaagtggtactcgttaattgggtgctaacaaccttgaaaccaattaaaacttttagcagtcagcggtcatcatacgagattaaacatatttttgaacgtacaccacttggcttttatgtattaaatggtgcaatgaaaggcgcgatgttaatcgctggttatcagattaagaacgaaaaagaaataaattggacgtttaatatatccgaacgtagcatttcgcgggcctatcaacttggataagaatttccgatttagggaattttatgtaaaaaaaagagatgtgcgttgagcgtgctatatgaacgcttggccccctaatatatagggggttggttaataacctgataaaacctaggttctaagtaaaggagtggttagcaccaatgattaattttactcccaaattgcaagaacagattagccacacgataaatcctattaaatcagtattttcattaatattcatattttatggacttaacttaaccggcggaagcagcggagaaaagctctttgggtgtttgatagccagtttgccggcgcggtaaattgtttagctttgactcaactgcttggatatcatgaggacccaaaatatccatggataaacccttgggtacatcgcggcggatcattcaactacggtaaaaatcgctgcgttgaaatagtgttcttttgcttgccctagagtatactctagggactattataaacaaaaagaagccataaacaaggatcatgctacttaacggcatagcatacatgactgattaaattaaccctcattagggaataggagcataacatcatgacaaaaaacgtattagttaccggcggcaacggttatctgggtctgcacattatcttacaacttttaaatcaaggttatcacgtccgtgccaccttacgccaactcgacaaacaaaccaccgtccgcaccgccctaaaagaaaatcaggcgcaacaccgcgaaaatttaagttttgtcgccgctgatctcactcaagatgctggctgggcgacagccatgcagaacatcgactacgtgctaagtgtagcatcacccgttttttccaatgacccgaacagcgacacaactgccaccgagggtattttacgcattttaaaggccgcccaacaggcccacgtcaagcgtgttgtcatgaccgccaactttggcgccatcggcttcagtaatcacgaccaaacgagcatcaccactgaagccgattggactgatcctaacgaaaaaggcttatcggcctatgaaaaattcaaactgatcgccgaacaggctgcctggcagtttattgaacaaagtcacggcagtttagaactgactacgatcaatccggtggcgatcatgggcccagcattagacgcccacgtttctggcagcttcgatctattgaaaaatttacttaacggtcgtcccaaaatgattcccaatatcccactcaatctgatcgatgtgcgcgatgttgctgacttacacattcgtgcgctgaccgcacctcacgctggcgggcaacgttttctggctagtgctgctggtcagatatcactaccagagatagcagcactgattcgccaaaaacgaccgcaaattgcccaaaacattcccactaaaacgatgccgaacttgcttttaagcagcgctgctttgttcaaccagaccgcccgcgaaggcaatttattagtgcacgtcaatcgtcagttgagtacccaaaaagcgcaagatatcctaaaatggcagccacattttgataatacgaccatcgtattagatagcattgacacgttaattcaatatggactactgccttaaattataaatttatttttatcacccccttgacaaacacttaaaatcgcgttaaattatagaaacattataaatcaatgagaaaattaaacgctgtgataagaaaagtataattgtattcaccagttaagcgagcgtcgtttggtgcaaggacgtcaaggtgcgacaattagaaaatcatctttgagcgttcattgggggctcccattatcgagctagggtatttcgtaccaattggtgcttgtacccgaagaggctgttttcgtgagaaaatggcaaatcaaggtggtaacacgtttattaacgtccttatctgaaagtaatttttcaggtttgggcgttttttgtttatcgtgatcattcccgcgcaggatgatcgccgccattactaaagtcgacttagcaatggcaacactcatgatttaaacgtggggcaacagacgcttagtctttgaaccacatttccacaacctacaaaatttaaggagtgctgcttatgttagaggaacgtaaactcactaaacgcgattatttcgtggttagttcaatgctttttggtctattctttggtgctggtaacttgatttttccattacatttaggccagctagcgggacagaattgggtgcctgccgcgcttggcttcttagtcactggtgtgttattgccattattatccgttttagcaatcagtatcactcgttccgaaggtgtctatgatgttgggcggcctttaggtcccgtattcgcgctcttattcatgatcttgatccacggcaccatcggcccactttttggtacaccacggacagccaccgtttcctacacggttggcttagcgccactagtaccaaagaatttccaaacagttggtttattagttttctccgctgttttcttcggcttagccctctttttctcattagaggaaaataaaatcgtcaacaatatcggtaagttattaaatccagttttcttagtcttattagctggcgttttcttcttagcttttagttcaccaatgggccacgccggtgttcaacacgccaccgctgcttatacatcaggctctttcgtcaatggtttcttgcaaggttataacacgatggacgccttagctggcttagccttcggggtcaccgtagttaccgccgttcgcaccttaggcaaaaaacgcgctaacagtgtcgcgctggtcactgcccgtgccggcgtcttcgcaatggcaatgatcgccgtcatctacgttggtttgatcttcgttggcgcgatgtccttaggtaaactcaaagtttccgctaatggcggcatcgcttttgaccaaattgtcaatcattatatgggcgtcgctggtcaggccatcttagccactttgatcaccgtcacttgcttaaccacggcgatcggtttagttgcggcttttgcccaagactttcataaacattttcccaaagttagctaccgcacttggttagttctaactactctggcatcattcttgaccgctaatatcggtttaaatcaaatcatcgcttggtcaacgccaatgttgatgttcttatacccactatcaatggtcttgattttattgtcagtcgcttcaccactgttccacaaagacccagtcgtgtataaattcgttgttctctttaccgttgttcctgcttttttcgacatggtaactgcttttccagcggtcgtcagccaaagtagcttcggtaaagcgatgactggcttcgaacaggcatacttgccattcgccaactacggcttagcttggttagtccctgccttagtcggtaccgttttaggggttgccgtccacgtcttcaaacgtgttagcgcccgcaacaccgtttcacaaactaaataggtaagtcaaaaaaacgttcacttgcggtgaacgttttttattgccttgaatttatactttaagtgcaacaaaagagactcatgatatgaatccctgtaaaatggtgtttgcgaagacaaccatcgaagggagcacataatcatgagcccatacaaacatcttaccatgagtgaacgcgaaacgatattcctgatgcataataatcaggcttcactgacttcaattgcccaaacaattggtcgagcaacggcgacagttagccgtgagttatcgcgaaaatagatcggcatattcaccttctgttgctcaagagcgctacgaagctcaaaaatctcattgtggacgccggtcgctactttctgatcaccaattgcttcaattaatccggcatttattcttggatctacaatggtcaccagaagaaattgccgcacgcttaaaattagagacctcatcatttcagatcagctacaccacgatttatcgtggcatctactccggtttatttgatcagaagctttcatcacgaggtgccagaggggtgatcagaaagcttagacatcatggtaaatcgcgccataaaaaaggttatgaggaacgtcgcgggaagattcctatatcgcatacactccaagaacgacctgagtctgccaataagcggactcagattggccactgggagctggatactgtagctggcaaaactggcagatcttgtgtggtcacaatggttgaccgttgttcaagatacttaataatgcacaaagcagctaagaaaaactcagccagtgtgaccactactattcgaagactactaaaagatctgccaccagaacacttgggtacgattacgcccgaccgtggcaaggaattcgctaaacatcatcaactaactgaagaatttgggattgatatttagaggtgatatgatggtcaaaattattattacggatcaacagcaaagcaaagaatatcagttaccaagttatgggagcttaactgttacaactcaaaataataaggtggtgttcattgaacgaacagacaagactaaattagtttaatacctgattggaaaaccaaagggatgcgttactgctagtacatggcaatagtgcatccctttttaatatgttggaggtgtcagagtgtttctttttgatattgatgaggataagagcagacagcaagcagatagattattaaagcgatattggcgagtgaaacatattgcaggtagtgccagtcatttaaagagtcctatttgtgatcatgcgccaaagtcttttagcagtgataatacaaccgagaaacgggcggttaaaacactcgaggcacggcagaccctagaatacatagacgtggctttaagtaagttaacggtaattaacagggaattgctaaagatgcagtatttaagtgctggtaaattaaccatggcttatatctgcggtgaactaggtataacagcatcatcattcaagaagcataagaagcaggctttgctagagtttgccgagtcctaccctagtgaaggcttattaatattcaagaagcattgataacggggatgcagtcctgatttaggatgccatcaaaattgaattaatacttaaggagtgaagcagtatgatcattgaccgaataaaccaacaagcaagtatcaaaaacgccagaaagctgttaaagagctatggcacgattagacggctagccacggtaaatactagtcatcccttacatgagcaggctaagtgtgatttaaagtgtattcaagcggttgtaggaggaatggaggatacgcaagcatccattattaatatgtgttacttagacggtagtcataaaacaaggcaatatatagcggatacgatggggtatagcaggtctagttataatcggtttaagaatagggcgttattagcttttgccgaaagctataataatcaagagttgcttgtttataagtaggttgcgcaaaatttcgcaggctagtttatggattagtaattgaataggacaagccattattggtttatccaatgtaaacctacgtgaattagcttttgttggacataaaacctaacaaaacctaacattaatttatttagagattttagaggccctaaagaaggagtcaccgaattgatgactccttaaagatgagttagtatattacaacagcatctaatgcactgatatggtgcgtcagatacttagccaattatagaaacagtacggccgaaaattcggccctaattaactttagataccgttgattttaacgagatgttgcccaatccatctttggtttcggctaattgcatggaagcaatctgaggtaccgaaacggtagtttagaaaaaggaggccctaaaatagggcggtttgtcgaaccgtgaaataacctgccataacagatcgttctattaggtcaaaataaaatgagtacagcggaaaattccgtgctactcaattagatataaattggctcaagcttgagcagatgtgttttgatatagaaacatatggagtaacgaaacgttacccctagatattatctaggtcgaaaaatacaaccaagctaaacttgggcccgtttgaaacgtctgtccaaaactggaggcacccccttatctaatgaatacagtcgcgatttacgacggaaaccataaatttaataaaaatgaatgctaatggttgctagtatgtttttaacagtctatgtttaacttaaatcgttggctaatgaagttagtccaaattaaaaaacggccactaatctgaccgcctgcagtaagttatgtatatgccccgtgcgtgatttttgttgaatacgtgaatacggttttgaatacggtttgtcgtattcactgtgaatactaatctgctaagaagaaataaaaaagccgtcatatcaatgcctaagcacctctataacgacttatcatgtatacttgatgggtggtcaggggatcgaaccctggacccacggattaagagtccgttgctctgccagctgagctaaccacccatatgatgtctcgccttacgacttaaatatcatagcatattaaacaaacttttgtaaacagttatttgtattttttttgaataaagttactgagcgcgtaagaattaatcgttatagggattaacaatgccgttaatccagttggtaggaattgacctaattttgaattgccttctgaaaatgagtataatagaaggcaaagcatccacattcaaggaggatccgcacatggctaaaaaaatactagtcgttgatgatgaaaaaccgatctctgacattgttaaatttaatctaaccaaagagggttacgaagtctacacggcttatgatggtgaagaagccttacaacaagttgaagaggctgtcccagatttaattctattagatctgatgttaccgaagattgatgggctagaagtagcccgccaagtgcgtaaatcgcatgatatgccaattattatggtgacggctaaagattctgaaatcgataaagtgattggcctcgaactcggtgccgatgattatgtgacgaaaccattctcaaatcgagaattagtggcgcgagttaaggctaacctacgccggcaaggtacaacgagtcaatcagataaagaagcgaatgaagaaaatcacgagattaacatcggggatttaacgatccatcctgatgcttatattgtgtcaaaacggggcgacaagattgaattaacgcatcgtgaatttgaattgttacattatttagccaagcatatcggccaagtgatgacccgtgaacacttgttacaaacggtttggggatatgattacttcggtgatgtccggacagtcgatgtgacggtccgccgtttacgtgaaaaaattgaagacaaccccagccacccagaatggttagtgacacgccggggtgttggttactacttaagaaatcctgagcaggagtaaatttgccgcatgaataagaaaattcggttgctacaatcgattcattttaaaattgccattgtgttcgtattgttgctgctggtaacgttggaagttatcggcgcttcttttgtgaagcaactggaatatcagaatgtgcgtgattttaagcaatccttacaagtgacatcctatattcaaaaccaacttagtaatgagttactgaataatagtggtaatgcgaacaagaatattaaagagattattggcgatatgggcaattctgccgaaattcaagttgtcgataataagggcaccattcgaggtgtcacgaacttgaataatcaaagtaccgttggtcaaaagacgcgtaacccacgggtgaaacaggttatttactctgggcataccgaacaagaagtggcatacaatgagagtctagggagctattatacagcgatccaaccgttgacgaacccaagtggggatagtaataccgttgtgggcgccgtttatattcgggctagtatggaagatgtttacaaggggatttcgtcgattaccgtcattttcttaacctcgtctttagtcgctggtttattagggatggcattatcgattgttatttcccgggcaattacccgaccaattgatgaaatgaagaaacaagcgattcaaatggcgcgtggggattactctgggcaagttaagatttatggtcaagatgaactggggcaactcgcgattgcggtcaataacttatcagtccgggttgaagaggcgcaagaagcgtcagagtcggaacgacggcgacttgatagtgtgctcagtcatatgactgatggggtcattgcgactgatcgacgaggcaatatcacgattatcaatgaaactggccaagattttttaaatgtgacacgcgatgagttactgggccagtcattgcttaaagttttacgaatcagtgatgaatattctttgcgcgatctattagaaacgcaacaggaaatggtcttggatttctcagaacaacaagatcacgacttaatcttgcatgttgatttttcattaattcaaaaagaaaccggctatatcaccggtttagtttgtgtgctccacgacgtcaccgaacaacaaaagaatgaacaagaacagcgcgaattcgtttcgaatgtgtctcacgaattgcggacgccattaacaagcgtgcggagctatattgaagcgctgaatgatggcgcatggcaagatccagagctagcgcccaatttcttaaaggtgacccaagaagaaactgatcggatgattcgaatgatcaacgatctattgagtttgtcacgaatggatcaaggaacggcaaagatgaatctcgaatatgttaatttaaacgagttctttgggtatgcactggatcggtttgatatgatgatcaagcgggatcaagagcacaaagatgatttgcctaaactgacaaccagcacgggcaaattgccaacagatgatccgaataagaagtacagtattacacgagacttcactaagcgggatttatgggttgaaattgataccgataaatttatgcaggtgatcgataatatcatgaataatgcgattaaatattcaccagatggtggcgtgattacgtgtcgcttattggaaacacatcgtcacgtgattttaagcatctctgatcaaggattagggattccacggaaagaccttggtaagatctttgatcgcttctaccgggttgataaggcccgttctcgtaaacaaggcgggactggtttaggcttggcaatttctaaagaagtgatcgaagcgcatcgtgggcgtgtttgggttgatagccaagaaggtaaaggctcgacattctacatttcgttgccatatgaaccaattgattctgatggaggtgagtgggatgcgatttaataactttttaatgcgcgttatactgattgctgccattatcgtcagtatcgggctatcatggctaatctggaccagtaacgcgcattatgagcgccaaacggacagtcaaaccaccactaagtcaacaagtcgtaagacagaacgaaaaatcggtgatatcttcttgccgacgcaactattgtggcggacagacaatcagagtcagttgatttataactcaaaagagagtttgattccacagtttaaagcgactttaaagcttgccaagtcggcacagtttaagcaagttaagctaagcgaagacgattattaccaggcaattagtgaggatcatacattgacccttttatatcctgataatatttcgtacgctatttttaaaaaggtcttcagttatcagaataataatttaggtcaaaacgtgacattcaatcggattcgaatcacgttgggcacacagcctaagttgtggttgatgaatgatcaaagtcatcaagtgtaccaaacgacactcaatgttttttcacaagctcgtgtgaaaaaggtgcttaaaaatgccgatgtgcatttgaaagtgaccgaaaaaatgttgaatcacaagccattactctatgtggcagcggatcaaacgttgttgccttatagttatttagttaatcaacaacccgaaaattattacatcacaacgctgttgaatcaacaaaatacggataatattgatacgaaagaacaaggcaatagtgcgatttatacggatgggacggacagcaatttgtataaacgcctaacgatcaaccatgataccggtgaaatttcgtttgtgaagtatgaaaatgagaaatcaccaagcacattaacaaagagttttgaagccagttttgatgcgctttcaaagacaggtaacgccctttcagggatgcgtttctatagttatgataaagcaacgaattcgactgcttatcggacctacgttgaaggattcccagtcttttatcagactaactttgggagcgtgaaagtacaattcttaccaactggccaaaagattgatttttcaaattatagtttgcaagtacccgttcctgctgaagacaagcaagtcacattgccaagtaccgagtctgttttgaatcaattgacaagtaatggtttcttgctagaaaatgtggaaaacgtgcaagtcggttatgaatggaccaaagaaaccagtaacgaacaagtgattgatttaaatccaacctactttgtacagtataaaggggtttggcgtagcttatccgcattgatggcgcaaaaagctgaattaaccgaagggagttagatgaatggattttcgcagaattgaaatgatttttatcgccatttttattgcgctggatatctatttatttgcctcgctgaaaggcagtcagacaataacgtcgacggcgattactagtggttcacagactagccagattatgaaggatttaaaagacgatcaaatttcagtgaagaaactctccaagcgccgaacggatggttattatttagccagccgacaaaaagatcagacattattagaaacggcgagtgccaaactaaccggtcaaactgtttcgtttgataaagcgcgcatgacactgacgagtgaattggataaaccactgacttacaaaaaagggaaccaacgcttagccgtggcggcctttatgaaggaaccagacaacgtgattcaagcggaggactaccgctattcacacgcattatcgagtgatcaacaagtcgtatatgtgcaaaaagtcccaggcgggcagatcatggatgaacatggtcagttgatttttacattagaagacgggcagattagtcattacacgcaaacttacacgaataagattcaagttttgcgtgaaaaagaaagtacgaaggtgactgctcaagacgcggtcattgatttatatacagataatgagattccgaataactcacgcattatgtgggtgaaactcggatacagtgctttgttggacgccaatagtagtacggtgtacgtgccagcttggcaagtggccattgagaataagaattctaagagtgtcgtcgttaagcggattaacgcctttaccggtgcgctgatgaagaaccgtagtgaaatttagttgttttagaaagagaccaaggggatagagcaaaacatggtagaaaaagacgcaatgcaagtcagcgtgctcgcaagcagtagttctggcaacacaacgtatattgaaacacctaatcataaagtgttagtcgatgcaggaatgagtgggaaacgtgtgcaagatttaatgcatagtattggccgcgatcttaaagatgtggacagtttattagtgacccatgagcatcgcgatcatagtagtggtgtcggtgttttggcccggcgatacggaatagacgtgtacgcaaatcaaccaacatgggatgcgatggcttcgattattggtgaagtgcctgctgaacacaagcacatttttgaaatgggtagtaccttgtcagttggtgatttagatattgaaagttatggggtgtcacatgatgcggctgctgcccaattctaccaattccatcataataaccgtgcctttgcaatcctgaccgatacgggttatgtctctgatcaagtgcgtgggacaattgaaaatgcggatgcttatttagtggaatgcaaccacgatttagagatgcttcggatgggaaagtatccttggtcattgaaacaacggattctcagtgataccggccatttatcgaatgaagatggggcatccgctttgatgtcgtttatggggaaccagactaaacgcgttttcctaggccacttgagtcaagaaaataacatgaaggaactggcccatttgacggttgcgtcgatcttaaaggaacatgattatggggtgggaacagactttgaaattctagatactgatccggcagttgctgatccattgtttgccgtgtaattagactgaatagaagacattttagttgtttttgcgaaataagttcgctaaaatgcggattagaaaaacaatttaatattcgtaacttgttcataattttttcaaatttacattctatgatagagataatcaataaacagaatttattagaaagtttgggtgaattagtatgaatcagaattcaggattaatgaaaacggctgttgttgccgttattgcagcactaatcggtggtggcgttgctggttatgccggttcaaagatgggaagtaacactgtctcaagcactgcccaagtaccaactaaagcaggtgccactaaaattagtaatatcaaagtcaactcatcttcacaaacaacaactgcctttaataaggtcaacaaagcggttgtgtcagttgttaacttgcaaaaacaacaagataattcaggcgatttgagtgcgctctttggcgcggatagtaccaataaaaaaagtagtagtagtgagcttgaagaatcgagtgaaggctcaggtttaatctacgaaaagaaagatggtaaagcctacattgtcacgaacaatcacgttgtttctggctcagataagttggaagtcatccttagtgatggcacaaaaattgatgctagcttagtcggaacggatgccgtttctgatttagccgttttaaagattgatagtgccaaagtgacgaagaccgcaacgtttggtgattctgacagcattaaacctggtgaatcagtgctcgcgattggttcgcctttaggctcagaatatgctacttctgttacccaagggattatttcagcaaagaaacggacgattgatgtgacggatgaaacaaccggtcaagcgactggccaagcaaccgttattcaaactgatacagcgattaaccctgggaattcaggtggtccgctagttaaccttgcaggacaagtcatcgggatcaattcaatgaagttagcttctaacgggagcacaacggttgaagggatgggctttgccattccaagtaacgaagtggtcaaaattattaaccaattggttacaaatgggaaagttgttcgaccagcgcttgggattagcgtcatcgatttgacgaatgtttcatcaacgcaacaatcatcagtcttgaaattaccaacctctgtgaagagtggggtagttgttgcatcagtcaatgccaactcagttgctaagaaggcagggattagtaaatacgacgtcattgttggtttaggtggcaaggatgtcacaagtgttgctgatttacacacgacactttacagttacgatatgaatagtacggttgaaattcagtattatcataatggtgaattgaagaaatcaacagtgaagttgactgaagcagcatcaacagatagtacaacggcagcaaaataaattaaagccgccagcatcaattagatgttgacggcttttttattttggttaaattcagactaaagtggcaggaatgttaagttttaaaaatgtcaatgtggatagtaacctgggaagaaatccgagcgtctgtggataagtctgtggattgtgggtataacacggttaaaaggtctttttagttatccacaaaaaaattaacaggcggtggataacttttttaaaattattataacaccagaataacgctgatataaaaggatttgtaaccggataatttgagaacgaacaatcaaaaaagggtggataacttttttattaaatttaacgaaaaaatttaggtgtcggttatttagtatcaagaaaaattcgagataccatatttgggacgaacacttgtgcatatgtggacaacttttgtggataagcagtactttccggtgaattactgtgaatagctttttttctgcattgttttcccctaaaatgtaagtaacagtaggaggctatttatgaacattaaagtaatcacagttggtaaattaaaggaaaagtatttaaaagcggggatcgcggaatatgcgaaacggctcagtaagttctgtaagttcgaaatgattgaagtcgcggatgaaaaagcgcccgaatcattaagtgacgctgaaatgactaacgtcaaagacaaagaaggcgaacgaattctcaacaagattaaagataaggaacatgtgattgtcctggcgattcaaggcaaacaacgtgcctcagaagaattcgcaaaggaaattcaagatttggcgacctatggtaaatcagatatcacatttgtcatcggcgggtcactcgggactagcgatgcggttaacaaacgcgccaatgatgcactttcatttggcaagctcacactaccccaccaattgatgcgcttagtattgacagaacagatttaccgggcgtttatgattaatcaaggaagtccgtatcacaaatagagataggcataaaaggcctcattgttgaatgaggctttttatatgcaacaagagagagcagcttgcaacaaaacaaatagtcatcgaattaagcgagatcttctgctatctttaggtttgtagaggaggcgagttaatgaaaattatatttaattgggattcaaagtgtgcacaagatacgattgtcgttcacagtcaaccacagaatcaagcaacggttgaatctgcttttaagaagctaacctttgatcaatcgattcaggtgcgagatgcgcgaacagatcgattacaaaacatatcattaacggcaattgaaagttttacggcctttggacatttggcgaaggtggcgacaatcgatggcaatagctattactaccctagtaatttaaaataattagccccgttttcgcagaacggttttctgagaattaataacacaacgattttaaatctgcagcaagttgccaattttgcggtgggttcaaatgcgcgattggtggtctatacgcaatctggaagacagtatattgttagtcggtattatgccaagcaaataaaggagtggttaaaatgatgaagcaaatccgcaaagactttaatcaagtggcattaatggcgattatgtggctcactgttgtcacaacgctaacgcggggcgaagcgctggctgcttggcgattagttagcctaggcgtgttgattggcattgtgtttggcgtcatttattcatacttatggcgctattcgacgttcggtgcgccgtggaatgttttgattagtactattagtaatattgggtttcaaatactcgctttgaggctctattcgacaacgttatttgatgttgtttcaccgtatttattagggacgtcgttattaacattcgtaatgcacgtgattattttttattactacacgcgctatcaaaataagcgcttagtgaacgaattgaatcaaaatagaaaataaacttgttgtcccctttgcaggttgtttatactagaggaactaggactatttgttaagtagaaatgaggggaatcagatgacgaagagacaacggaaacgactttggctagcaagcggtgtgattttactaggattagtgattcttctaattggatggcaacaccagaccgccgtttttgctttcttggatcaatggcaaaattaccgccaatatgtgcttgagattcgtcatctggggccgtatgctttcttggtgtttggtctgttaatgattggggtcaccttaattccgggtgcgccaacatcagcggtggcattgattattggcgcgtgtttgggtcattggggtggtttcgtggtcaatgcgattggcttgacgatcgggaacttgttgcaagtccaattatttgcccgtgtcagaaatcatcgcagtaaaaagccggattcgcgtgtttaccgcgcattaattaagatgcaacatccagcgcttggtgtattaattggctatgcagtgccgatgattcctacggcctttgtcaacttggcggctggagacacccacctcaccccccgagcacagggcctggcgtgctttgggggttcaacgattgtcgcgtttatctacgcctttgcgggcgatttgcttattttgaagcaagattggaagagtttattgattctcttgatagtcgctgttgtgattggtttaacggaatatggtatccggatgcggcggagtgataaagctcgccaaaaagtcgaacagtttgacgcattaaattaaagttagaagacgtcctgaggaggacgtcttttttatttgtatgaaaatgtatatgataaggtatgatattaaaagtgattgatatactgaagtaagctcgttaaacgaaataacttatactataataaatataaaagaaaaatacatggggcacgcaatcgtgagtaagaaaaatacacttttggtaacattagcattattattatccaacacaatggcgggactcgatgggacaattatcaacacggctttgcccgctattatcagtgatttacacgggattcaatatatgggctggattgtggcggttttccttttggggatggcggttgcgacccccttatggagtaaattaggcgaacggattggaaatcgtggggcttaccagctggcgacattattatttgcggttggttcgatttttcaggcggtttcggggaatatcgtcttctttctgattgcacgaacggtgatgggcatcggtgctggcgggatgaatactttaccattcattatctatgccgacttatacaaaaatttacgcaaacgcgcgcaggtgattggttatgcgactgcgagttatagtgcggcttcaattgtaggacccctaattggtggctggattgtcgatacgtttagttggcattgggtcttttatatcaatgtaccaattgccctagtatcaattgtttgtgttcgttatttctttaaagaaacgcttaaatcacatcaaaccggaaacgtcgattatttaggtgctgggattatgattaccagtttggtgactttattgacggggattcaaatgattgggacgggttcgctagcactcgttttaggattggtatttgctggtttagctttattagttgtcttgtttagagttgaagaccgggcagttgatccgattgtgccgaaccgcttatttaaaaatccgcaattggtgaccgactttattttatttgttgttttatggggcgcatttatcgcgtttaatatctatattccaatgtgggcgcaaggtttacttggattaagtgcgctactcggtggaatgacgcagattccaggtgcggtgaccaacttaattggctcattggcgggtcccgcaattcagcctaaattgggtaaacaccgcgttgtgacattgggaacagttgcgtttttaattgcgtttagcggtatgttgatgatgggcgaccaagcatcgttttggttcttactgttgatgggggcctttgaaggtttcgggctcgggatgagttttaacgtcctacaaatcagtgttcaagaagatgccgaagaacgtgatgttcccattgcgacgtcgtttgcctatctcttgcgaattctcagtcaaacattcatgtcatcgatttacggtgtgattttaaaccatgccttaacacgcggcattgccgaatcgcacggtcaaattacgatggcgatgatgaataagttaagcaatctccaacgcgttcacgaattaccagcgcacttattaccagcgatgcgcgcgattatgtaccaaggcttgcataacatcatgctgattgcgacagtcctattggtgattgtgctcgcgtttaatatctggttacagatgaaggcgaaaaaagaaaattaaaaaaagtgttgaaggtcgtgagtaagttggccctcaacactttttttaataataatattttaaatcactcgccgggcttgggtagttatagatggtatcggtgagttccgttgcggttgtctgatgtttaatcaggttggtaaagtaattaatgagttcttcagcaattgtggtgtaagccgcagcaccgacgagttggttagtttgattgtcaaaaatggtgatgaccattgcgtcggattcttgaatacgattgaaggtataccaatttgtgacggtttgttgattaatgcggtattgactaggagcagcttgtgcagttgcaacagaaacgcctacttgtgatatttgtgggcttgcatataccgtatgtggaatgagtgggtaagtaatgggtgctgtctttttagcgagtagttggttggcgacatagcggccttcaaaaccagcaactggtgttaatttgggttggacacgatctacgacgtcaccaatggcgaagacgcggggattactactcattaaatggtcattgacttgaatgccatgctggttcgctgttaccccagctttttccaatgccagttggtcgatattgggtttgcggcccattgcggcaaaagcggcgtcgactgtcagtttaaaattagcttgattactgagagttagctgattgctggtttgcgtaattgttgtgacgtcagtgtcaaaatgaaagtgaatgcctttttcctgaagactggtgacgagtttatgtgttaaaacttcagggaagtcgcgtaaaatacgctcgttatgttgaataatatggacttctgcaccagcagtaactgcaatatttgccagttcaatggcgatatacccgccaccaataaaggcaaccttttctggtaaacgatcgaggtctaaaaattcattactggtttgtagtaaatcgtgaccctcgattgtagggagcgttggtgtttgaccggtcgcaatgatgaaatggtcggcagtgtaagtgtcaccattaatctgcaaggtttgagtatcactgaagtgggcggtgcccgtgacggtttggatgccggcatgttgtagaccgttgagggtaccagttgggatttgttgcgtataagatcgcttaaaggccatcagttcagaccagttaatagcgctagttccgactaagccatttgtttggagcgcttgttgattgtcgagtgcttcgacagctgaataaagcatttttttaggatcacagccacggttggggcaagtgccgccccataaatcattttcaacgactaagacggactgttgttcagcgagactgtaagccgccgctaagccgccaggaccgccaccaataatgattgtatcaaagtgtgtttgcatattaagacctcctcagatttcaattcgggttcatcttagcatagtcacaaagcgaatcaaaaaaattggattgggtgtttaagcacgtcaattggtgggctgattgctaagtggtacaataagttaacaaatcgttaaccggaaaaaggagtagcacatgattgaatttgaaggtgtcactaagcaatatgaacaaagcttagcattagatggcttgacgttaaccattccagacaatggtctatttgttttggtcggaccgagtggtagcggaaagacaacaacggttaaaatgattaatcggttaattgaaccaacgagtggcacaattaagattgacggccaacccatcaatcaaatggatctccaaacgttacggctcaatattggttacgttctacaaaacattgcgttgtttccacatctcacaattgaggaaaatattaccattcaattagaggtattgaaatggaccaaagctgatcgtcaaaaacgggcacgcgaacttttggaaatggtccatttagatccggatcagtatgctagccgttatccaagcgaattatcagggggacagcagcagcggattgggattattcgtgcgttagcaactagtcctaaggtgattttgatggatgaaccctttagtgcgcttgatccggtgacccgtacacaattacaagatctcgttttgagtttacaaaagcagctgcataatacaattgtatttgtgacccacgatatgaaagaagcgttgcgcttgggcgatgaaattgcggtaatgcgccaaggcagtattcagcaagtcgggacagcaaaagcgatttttaatcaaccaaaaaatgaatttgtccgcgaattttttgacattgaacgccaacaagcaacgttgacagttcaagatttattggcggccgatttaggaactgttgttaataatcagccgacaacgattacgtccagtgcaacattagctgaattagcgcaacaattagtagaccatccagatgggggcgtagttgccactgatggtcaagaacaacggcaattgacgatgaccgatttaacaacgctcattgcgaaacggggggtatgacgatgatgcaacagattgaacaaattttaacgacccaatccggtgagttgctacaagcacttgggcaacatttggagatttcgttattggcgttattaattgcggcggctatcgggattccgttggcgattgttttaacagctcatcagaaattagctgaagcaatgctgcaagtcacgagtgtcttacagacaattccgtctttggcgctcttaggattattgatcccgcttgtcggaattgggacgattccggctgtgattacgttagtactttatgccttaatgccgatttttcaaaatacatacactggtttgatcggaattgatccagcattaaaagaggcagaaatagccttcgggttgccgcgcgctaaacggctactacggattgaactgccacttgcgatgccgttgattatctcgggtttgcggattgcactcgtgatgattatcgggacagctaccttggcggccttgattggtgcgggcggcctcgggacgtttattcttgttgggattcagtcaaataataacgcactattattggttggggcgacactttcagcggttttagcgttagtggtcagtgcattaattcgctggttagggacattatcctttaaaaaaatcacagtcagtttagccatttttgttggccttttcggtgtgatcgaaggaatgacacggtttcaagcgccgcagaccaccatcacgattgctgggaaattgggtagtgaacccgaaatcttgatgaatatgtatcgtgatctaattttagaagaccagcctaactacaaagtaacggttaaacctaatttcggtgggaccacattcttatttaacgccttgaaggctgataagattgatatttatcctgaattcacaggaacggttttacagacgttggtgaagtcgccaactaagacaaaccagaatccaactaaaacgtatcaacttgcaaaaacatcgctacaagaacagttcaatatggcgtacttaccgccaatgcgctatcaaaacggttatgacttggcggttactgcggcctttgccaagaaatataatgtcaaaacaatttcggatttagccgctttgaatcaaccatttacggccggttttgatcctgatttttatcaccaaaaagatgggtatcaagggttaaaggacacctatcaattaaatttaaatgctaaaattatggagccaagtattcgctataaagcgattgcggacggcaaggtcgatgtggtcgatggttatacaaccgatgcggaagtcgcacggtacaaactagttgttttagaagatgatcgtcacttcttcccgccttatcaaggggcaccgattatgaaagccggctttgccaaggcgcatccggaagtcgtcaaagcattgaatcgcttggcaggtcagattactgagagccaaatgcaagagatgaactaccaagtacaggtcaaacaccgcaaagcacgcgatgtggcccatgattacttggttaaacagaaattaatcaggcactaacgaacaatgcttgaccttcacgtcacgtcaggccttatagtgggttttgaaggagggaaggcaaatggattatcagattaaaactttcgctgaattgaccggggtttctgagcgtacgctacgttattatcacgagcgcggtttactggtgccaacggttgctagtaatggttatcgaacgtattcgagccaggatgcagatcgactgcagttaatcttaatgtaccgtcaactacagtttagtctggctgagattcagcagctgttggcgttaccaccggccgagcgtctggaacgcttagcaaatcagcgggaacaactggttaaacaacaagctgcgctaacggcaacgttagcacagctagatgcgacccttcaaaatcaaaccggaggaattcaaatgacagatcaaactaaattcaaacagtttaaacaacaggcagtggctgaaaatgagcaacgctacgggcaagaagtgacgactaactatgggaaacaagccaagcaagaagccgatcagcactttttagggctaagtgaggcccaatatgcaacgatgcaggcggctgaagaccgattgaagacggcattacaaacttacttggaccagccgcaattgccatcagaagcggcgcaaacagcctttgaagcccatcaaacgtggttacaaacagcgactccccggtatagtctagcaatgcaccgcggtttagcagccatgtatgtagcagatgaacgatttacagcatactacactaagttaattggagatcaacgcgtagcggaggctttacaaacgattattgaatattatgcaattgaagcctaaaaaaggactgacatttgtcagtcctttttgattatttagcgggaattttccgtaatacccgtgctggattaccaactaaaattacgttacccggataggatttggtcacgacactgccggcaccaacgacaacgttattgccgagcgtgattcctggcagaattgtgacatttgcaccgagccagacgtgattgccgatagtaatgggactagaaatttctttttttgtcgcacgttctaaggggtcaattgggtggtaaggggttaagagtgatactcctgggccaaatttacagtagtcaccaatggtgactggtgcttcgtcacaaataacgacgttacgattggcgtaaaaatgatcgccaatcgtaatgttttcaccgaagctaaattcaaaaccggtttcgatgaaaaaatcgctaccggtatgaccgagtaatttttggatagtggccatccgtgcatcgttatctaagatttggctggccttttgtaaggcaaggcgggctgcatcccgtttttgaatagtgaccgctgaatcaaagtaccattccccgttggtcatcgccctaaaagcgtcgtcagtttcgtgcatattataagtcgcctccgttaattgtactctctaacgatagaacaatttatcctggagtgcaaatccggttagtgattgcagttcggaactatctatgggatgctaatcatagataatttttggagggcaatacgatggataccaagcaaaagctagcagataccttaaaagaattgatgaaaacaactccggtcgatcacattacggtcaatcaattgacaagcagtgctgacgttgcgcgcaatacgttttattaccatttcgccgatattaatgagttggttgcttggatttataatcgtgaaattgttacgcaactggcagtgtatcaacgtgaacgggattggggcgtcggtctagatgtcttggtaacttatattgaaaataatcggcatttctgtttaaatacgtttcattcacttaatcgagatttgctaagtcgctttttgtatcgagtcgcttttagcatggttgcaggggttgttcaagatttaaaggtggattgtccagcgactttccgagatgaaattgccaatttttatggttgggcattggcgacacagattacgcaatggcttgtaacaaatctacaagaatctaaagaggaattttatcagcgcatgcatcgcatgttaaatggtactgtgaaccatgttttacaaaataatcattagatttggacatttatcctgaattgaccatacagaaaccgccagcttgcagttaaagtaagaatgtaattagcaattatttctttggaggtgactgatatgtttttatttcaaaatatttcaggaatggattggctagtttggggactagtggttattgcattaatggttttaaatgaagcagctcgggctaacaagtggattggattaattctctttgttgggttgccagtcgttttaacgctctttgtttggccaacgacggctggtcctggtagcagtaccgggacttggttccactgggttaaagtgtactcagcattagcaggttgtttagggtttatggcgctgcgctttatccctaagttacaacacaacaagtgggcattgattttcccacccgcaattttagcgtttaatattatggaagctgtgattcgtgattttcaagtttcacacctacatggcttagtcgacggtgtgatcatgaatggtggcgcgtggaatatcatgaacgggattgccggaattattaacatcatcacaatctcaggctggttcggcattattatcagtcatgacaaacaaaaagacatgatctggcccgatcaaatctggccttggattatcgcctatgatgtttggaacttcgcctatgtttacaattgtgttggtgatcactcattctatgcgggcgctgcattattaatttcatgtacattagcagcattcctggttaaaaaagggagctggctccaagcacgtgcgcaaacattggctttttggatgatgtttacaatgagttatcccgcttttgtaacggattcacaattttcagtgcaaggtacgcacagtagtgctgctttgatgacaatcagtggtttagcactggtcattaatgtggcagtcttaattctccacatttatcgtgtcatgaagtataaacgcaacatcctaactgacgaagtctatgctggtacaaaggcctatgaccaagtcgtggcagaaaacacgtcggaaggtaaataaaacgaggctcaatgaaggcgcagttcaatttgaactgcgtctttttttgcattttatagtatgatagatcctataaaggcgggatcaacatgacaactttttattttgtacggcatggtgaaacgatggttaatcgagtacagtgtttcaatggtggtgggacgaattcaacattaactgaggcggggcaagcggctgctaaacgactaggtagtttattagcggaccagtcttttgatgcgttactgacgtcaccattaacacgtgccgttgaaacaatggatgcgatagtgtcgcagactaatcaatcacaaccggcaatcatggtcgtggatgatttaaaagaaatggcacttggtgattgggaaggccaacctggtgctagtttgacgaaccatccacaatatgaaaattacttccatcatccagagctgtttgatgccaaacagattcacgcggagtcctaccaggcggtcttagaacgtgggatgctcgcgattaagactgctcaaacggcgtatcctgatggtgatgtattagttgttgcgcatgggattattttattgtttgttatcaacacactactagggattccgtttgaggaaattcgatcacaaaaaatggttgctaatgcaagtctatccgtactaaaaagtaaaggcacgcagtttgaaaaggttgtgtggaacaaaacggtttaggaaggatttctggatgacaataattatgattcttttgatcgttgcgttgggcgcttttaccagaacggtttttgggtttggcgaggcattagtaacgatgccattattggccctaatagcgattgatttaaaagcggcaacggctttgattggcgcgctgggactaattgtggcgattccggctgtgattcgccaccgccaacagattgatatagcggttgtcagacgactagtgattggttcattattgggtgtgccagtcgggatagcgttgatgacgtatgtgccaacgacgattgtgttgagaacgttagctgggtttttaatcctttatggcagctataatcgctatcagttacaccgacatcacgtgcagcagcaacatttacagtcacatcattgggattatttagctgggataatatcaggcatgatgggcagtgcctacaatagtcatggtgtgccggtggtgatttatgggacattaaaaaaatggccagtagcatcgttaaggggcattctacaggcccattttatttgtgttgggacaatcgttgtaatcagtcatattctagcgggcttttggaccatccaagtattgcaactattgggacttagcttaccattattgttagttgtgattccgttgggcaattgggtgagcactcgaattgatagtcgaacgatggtgcggtatatttatgacttattaatcgtttttggttgtttgttgctgtataaaacgttgtaaaaggtcattaataggtggttggtttattaaatgatgtaaagcttatggacaacgccgcagatagtatactaaaacgatagtgtataaagtttaaatactaaggggcggaaattaatgagtaaagtattagttgttaaggcgcatccacttgctacagaacagtcacggacgttaacgattttggcgcagttcatgcaagtttatcaaaaacaaaatccagctgatgaaatcagttggttggacttgtaccaatctgacttaccagaaattgatcaagaactaatgacggcatgggcggcgttaaaaaagggcaagctatggccaccttaagcgctagtcagcaagagaaggtcgctcggtttaatcgctataccgaccagttcttagcaaccgataagtttgtgattgctaatccgctttggaatttaaatgtaccgacgaaacttaaagcgtggattgacacagtgatggtggctggaaaaacatttagacatactgaaacagctccgcagcccttagtaactgggaaaaaagcagttcatattcagtcagccggaagcgtttatgctggccaagattttgcaacacaatacgttaaaacaattcttggctttgccggtgttgacgaagtcattaaaattagtatcgaaggaattgattattcgccagaaaaagctaacgtgattatgcaggaagctattgaaacagctaaacaaacggcacaagttttttagaggcgatatagtggagggataaccatggattttgaattaccgatatatccagaaaatcaggcggcaatgaagaaatacatgcagagtcaatttgaatttaacggtgttaaagcaccggaccgccatttaattgaacgcgaattgtggcagtctgtgaaacaattgccaccagcagaaataatgcagttcattgagaccttatatgctcgaccaacgcgtgagtatcaatatgttgccatcgagatggcattgcgttcagtacgttggtgggaaccggctgatatggaacatttattaacgttggtgttggaaaaagtttggtgggacagcatcgatgcttggcgaaaagtatttggagagtacatcagactgcatcctgaacagtttgattgggttgtacagcattttataggtgctgagaatttctggctgcgccggattgcgattacgctacaactcagtttttacgaaaaaacgaatgtggcgtttttggaagaagccattctggcagatattgacacagatgagttctttatccaaaaagcaattagctgggctttacgtaactatagtaaggaaaaccctgagtgggtgatgacgtttgttgaagaacacgaactaacaatcttcgcccaacgtgaagccttaaagaaaatcaaacaaaacaaaatgtttcacaggaaacatacaaaaagcagcacccatgataactaatcaagggtactgctttttaataacttaatttaagagggtaacagctaataacaagtattaatggtactaggataagctaatttattatttatctaaacccgccagaactttagccggaatttgattcttggacacagtattaggcccttttaagacgcgttttgaattaaattcaactttgacatagctgttgggagtgagtggcgttggattttcgccagtaacttcgacagggaccacttggtggctaccatcttctttcaccacatttagttggtagtgatagctatacatattagtcactgttttacctgaatcatctttggtggcttctttagctggagattgagcagcaactttggcgtagcctacttcgccgacatacgtatttttgtattaacggtagccagcaaatccgacgatgatgagggcgattaccgcaataatgctaattgtttttttcattgaatgagaactccttattccgaattgataaagttatcatacgatgttaagcgtaaaaaagcgacgattttaagatcagatgacaaaagtgttagccgagttaaggccattgtcacctaatgtttaaattggcggtattgtgcttctaaaatagcgctatctaagatgtgaccgcgcattgccgctgtcatttgatttaggtaaaagccaggctgtaaatcgagcgtggtatcaagtgcaaatactttaagtgtataagtgtgatcgcggttagggggtgtcatcccgccgtagcaagcacttgcttctgttgataaatggtctgttttgggactgtgccaagtattaacaccttggatgaaatcgggcgcttgttggctagcattagccgcgacagtggtcgtttttaaattggcaagtgtccagtgaatccaaggaaacccttgcgtcacttcgtaggcatctagatcgtagaaaacggcagcataactgactgtatcgctaggtgcgtcttgaatgttaaacggaatggaataagttggcacaccttccgcgttaaattgagtgccatgaccgccgtagaggtcgtcgaagtagccgtgatgaatgccagaactgataatttgcatgttgaatctcttttctattttagattttagtccagtcgtcaattgagcgaccatttgtgtcgcatagttcgagccaactattggtgccaccaaagtacaagaagaggccgatttcattcacgctcttgaaaataatgtcttcagtcgtttgattgtcttgaatttgcgctgcatgttcgttgcgcaagtgagtgcccattttagcagcaaagccaaacgagccatccttattaagtggcgcggttggccacaattgtgcccccgctttcaataacatctctttgcgcttttgccagatggctgttccttgtgcttcgcgcgtagcaacagtgaattcgatttggctgacggcttttgtccatcgatgacgtgttttagccggttttgctttgactggtacgcttttggtcaggggataaccaaagcggctgaggaccaagatgatggcttcaacggctggagctaaggttgttcggaaattttgagagacgttggacggaagcgaggtgctcgttatcggtggttgattttgttcggctaatagctgccctacgtagccaatttgttcagtccactcaggatccatggtaatccagatacccgtgtcaacttgatcagtcgaggctgtttcaagtggggagagttgttcaatttgttgcagttgttgctgcgcaaaaccgaggaataaagcggggtgtgcgaatgcggttgtattagccggtgtttgttcaattaaaagctgagtaacgggttgttcgattaaatcgacgatcgtttgggtagccgttaatgttgcattaatttccaaggtcataggaagcctcctgacagtctttgatgcttctaattaaacactaaatcgctggttttgtcagccagtaagaattgattgaaggaatgcttgaaactgagattcaattaaccggaattaacgaatctttgttatgatagaaggtaggaattttaacgggtgggagaaatggcatgcaagcacaagcggtactaaaagaaaaatttggttatgatcactttagagaaggtcaagcagatgtgatcgaatcattgttggcaggcactaatgtcttggcgattatgccaactggtggcgggaagtcattgtgttatcaaataccagcattgatgctacccggtttaacgttggtggtatcaccgttgatttctttgatgaaggatcaagtcgatgcgcttaatgaaaatgggattccagccacgtttatcaatagtacgctaacgcagggggaagtccaagaacgctttaaccaagctgcgcgtggtgaagtgaaattactatatgtttcgccggaacgcttggattcggattactttttagctgatttagctgaattaacgattgatttgattgcggtcgatgaagcgcattgtatttcgcaatggggccacgattttcggccaagttatctacgcctgacggatacgattcagagtatgcgccaacgaccaacgattgtggctttaaccgctacggcaacctcacaagtggcagctgacatcatgcaacggttgaacattcagcacgaagttaagacggggttttcacggcagaatcttgcgtttcaagtagttaaaaatcaaaatagtgatcgctacttaatcgattatttaaaggtcaacaaacaaaaatccgggattatttacgccagcacacggaaagaagttgaacggctcacgaagctgattgaaaaggctaagttagatgtgacaatgtatcatggcggattaaacgaagcggtgcgtcgtcagaatcaagaggattttctctatgatcgcaaaccgataatggtcgcgactaatgcgtttggcatgggcattgataaaagtaatgtgcgctttgtcgtgcatgcccagattcctgggagtttagaggcttactatcaagaagctggccgggccgggcgtgatggcttgccgagtgaagcgattctattatttaaagtgaatgatgtgcagattcagcatttctttatcgatcagtcggaaatggacgaagcgcataagcaacaagaatatgccaagttgcaagaaatgacgcagtacgccaatacgcagcaatgtttgcaacagtacatcgtcaattattttgatgatgattgtgaagcgtgcggccggtgcagtaactgtctggatacgcgtgaagaacaagacatcacgattgatgtacaaaaagtcttatcgtgcgttaaacggatggatgaacggtttggcaaagtgttggtggcgcaagtattgacgggctcgaagaatcaaaaaatcatgcaattccgctttgatgaactcccaacgtatggtctaatgcgtggtgattcgcaaaaagaaatcagtggtttgatcgattacttagtcgcttcaggatatttgcaagcttctggcggtcaatacccagtgctgcaaatcacggcggcgggagttgcagtcttaaaaggccaagcgaaagtgacgcgcaagatggcggtcaaagtgcaaaaaacgttgcctgaagataatgaattatttgaacaactacgtgagttacgccgcgatttagcggaagaacaaggtgtgcctccgtttgtgattttctcggataagaccctatattcaatgtgtgaaatcatgccaacttccttgactgaaatgctagatgtcaaaggggtcggcgaaaataaactagaaaaatacggcgaacaattcttggatatattaatggcagaatagagtgctgagcattgactggatttaccaaattggcgatgtaatcgctgatttggtaaatttggttaagtgcagaaatatgctggcgagaacacgtttcaacaaaaaagcgtcaacggattctaatatccgttggcgcttttttagtatctagtatggtgcatctgctggattaccatattcaaagtgttggtttgactttggattgggtttcgcatcaggtagtaaacacgtataacgtgtaccatcaggaccttcagctaggaagatgcgagtaaaatcattttcagtttcgatcagcttgcagttttcgtgggttaacccataaacatcagttacttgcgtaataatcatctctttttcttaatttgaaaggagtagagtaaccgtacattctaccaccgacttaataataagtatagacttttattgataaaatttcaaattaatccccttatttggtttgagtttcaagctggtggagggtttgtttcaattcaagtccgccacgataccccccaatttgcccgtctttacggtagacgcgatggcaaggaataatcattaatagtggattgcgaccaatggcagaagccactgcgcgaattgcggtggggtgcccgacttgagctgccaaagcgctgtaagttgtggtttgaccatatggcatagcttgtagggcgacccaaacacttctttgaaaaggtgtgccgccgataatatcaattggcagtgaccacgtggtttggtcaccatcgagataagctgttaatgattcactataaggagcgattgcagcttgatttgcaactaatttcgtttggggaagaaaagtggttaattcactgatagtgccatcgggtgaaccaacaaaacagatacctttgggggttgctgcaataataaatgattggccagcatggctaaaagaaccatagaagattgttagcatttagaagccctccttttgattgccctcagtatagcatgcccgttaaaaaacgaccaagccgtaaacaggctcagtcgttttttacttagttaagcaactggttgaaaggttttattttgaagatgatactgaacatcacaacttgctgcgacttctttttcatgggtgacaagaatcacacatttttgttgttgatgggctaattcttggaagagatgaatgatctcctgcgtattttgttcatctaagttaccggttggttcgtcggcaacaacgatgggggctgaacagcacatagcgcgcacgatcgcaacgcgttgttgctggccacctgatagtttttgtacgttcttatgggcgagttcgggattgatgccaaccttgctgagcatttcgagtgcgaaatcggcggcactttcatgcgtcgaatgagtaatggccatcgcagtcaagacgttgtcgagtgccgacatgtaggggagtaagttgtaggcttggaacacgatggacacatagcgattgcggtattgggttaagtcgattttttggatatcggtaccttcgtataaaatactcccgcggcgcggtttatctaaccctgaaagcatggtgagtaaggtcgtttttccagcaccactgctaccgatgatgccgtaaagtttgccggcttcaaaatcgagattaacatctttgtaaagtgtattttcttcagtatcgtaccagtaactgacgtttttagctgttaacatagtggacctcctataattatccaatgagaattttgcgtggctcgagtcgtaaaatattgagtgatgcgagtaagacggcaaatgcgatgatggtgaagccgaatgcgccaagttgcattaaggtgacggcactaatcttcagatcaaggtcgcttgctttgacggcttttttagcagattggccaggttgttgcatttgaccacttggccgattgccaccagtttgcccactaggggcttgaccgccaccagggccgccgttaccgccaggttgcatgttatttgtttgtgagctggttgtcgtttcggttgtgacggaacgcataacttgtttgctaagcgcttgaccagcgaatcgtccgccaatgccggctaaagctaaactgacaatcagcagcatgaacatttcaactaataattggcccacgattttgacgcgcttttcacctaatgagagtaaaacgcccatttcataacgccgttcgcgaaccattaagataataattaatgcgaggataacagtgccagcgatagcgactaaccaaacaatcttattagcaaaactggccattttctgcatggattgtttgagtgattggtaagtactgtcatcagctgttaccgtgaatttcttcgtattgataatcttcttcgctgcttttacaaaactatttttcttagttgggtcactaagcgtgaatgtggcactatccactttgccagtttgacctttaatttggttagctaatgtgtatgccgtatagatgacgtttgcggggtctgtttgttgtggacccatgccagcgctactttgactagccttatagatcccgactacttttagcgtataggcttttttgcctgtcgtgctggctttgactttaatggtgtcgccgactttgaggctgttttctttagccaattcggattcgatgacgacattattagtgtttttgtcgctactatttaaagcgcgacctttcgtgattttacttgtattatctttaaagtcgctgagggttgcggtattgagcactccggtgatttgtaagtcacctgttgaagtggatgactcagcgttgccgccagggccgccgtccatcatgccaccactattatttgaactacttgatgtcgtaatggctttaatggacgaggcgttcgcagaagtcgtgacgctgacgttataatttgccagcccggataatttcgaaatagccgttacgtcttttaatttgacggagggcatggttaatttagggcgcgttgctgtagtacttggggcatcactgctagccgaggcgcgcattttcttaaacgcttgatcgcgatttgcagaaagggtgacgctagcgcccacctgttgtttggtattgttgacggttgtaatggctgcatttctaatcaatagaccagccatgataaaaatcatgatgacggtcatcacaattattaataagaagctacgcccttttttaaagatgacgttttgccaagcacgcttgataaaattcataagtatttcctccttaaaactgaataaatattagtttaggcgggaaatatgaataaattgtgtttgaaatgaagttttttttaaggcgtatttgtgaagattaaccttatagggccaactttctagctcctaaatatggtaaattatagggtatcaaagttaatcggaatgaggagagttaaatgaagaagcgacaacaattttttaccttattatggacaggattaatgttaataatgcctgttgtttcagttattggtagtgcacaaacggtgtctgcgagtgagacaaaggttacacaagtgacaccacgtactgcatctagtacggattatcaaaaagcaatggtggctggggcgcaacagttgttgaataatggccaaccagatgcatggtcagcgttagcagctattcaatcaggcgtgacactgagtgcagcgcaacgcttgagttatcataatgccttggttgcggatgcacaatcaatgctcgctgatcaacgtttttcggcaaccgatttagaagtgttggtaattggggtaacagcacttggtgaagatgcaaccaacttcgctggtttaaatataattgataaaattattgaaaaagcaccaactggtgggatcaacgggcaagtttacggcatcatcgcccttagcatgcgtgattatggtgccaaggcacagcaagcgattgatagtttaattccaacggttttacaagcacaaaacgctgaaaatggctgggcttttttcggtagtaaaagtgatttagatacgaccgggatgacgatgacggcgttggggatgcatcgtgacttcccaggcgttcaagatgcgctagataaagcggtaacgatgttgaaagaaaaaacatttgttgcacaaacgggtggttttttaatccctaatgtttatatgacagaagaaaactcaaatagtacggcaatggttgtcatgggcttaattgcagctggagttgatccagtcacaacatttgttggcgatcaaggcgctaacccgatttcacggctggtcgcttatcaaagagcagatggacagttccgctggaatattaataacgatatgggatcgctagcgatgtcaactgaacaagccgtttatacgttagcccaataccggttgttccaagcgggaaaaggctcaatttatgattttaaaacgccagttattgaaaaagcatcggtaaaggtccaagcagttgatgaaaagggacaaattttaaagagtcttcaattagctgaacaacccgttggtcaaaccattacggtgaatgctaatcaagtcgcagttgagggttatgaattattaggcaatgcacaacaaactgttcaagttgctaaaacgggaacgaccgtgacgttccagtatcggaaacaaatgattgggacaattcctgcagcgcagtttgctgacgttacggtgcaagcagtcgatcaaaacggcaaagtgtttaaaacaattcaattgcagcatcaaagagttggacgcacaatgttgattaatgcatctgatgttgcagttgagggttatcaattaaaagacacgccaaccaaatccatcacgattaatgcagcgaataatacaatcagtttcaagtttgaacgacaagtgactacggttgaaaaagaaaataaacaccaagcagacaatcaagatcatgctcaaataaagcaaaagcaattaccacaaacgggtgttaactcaacagtagttgcttctgtagccggcttgatacttttgactgggattattggcatttggttcaagcgtcaagttgaacatcgttaggagttagatatgtctaaaaagagaatcattgcgattatcggtagtttagttattttaagcggcatcggatacggtacctatcaaagtgtggctcaagataatccgtctacgcgtagtcaacatgttaaagaggaacatagatcaaaaaaacgggtcaagccagcaactgttggtttagatggtaaagttaaatctaaggcctctgagtcacatagtagggcggtatctgaaagtcggaaaacagctgaaacgcgcaagtccagcagtcaatctgaacagacaaatgaatcatcacaaaaatcggcctctagcaaacaattagcatcgcaacaagctgtagaacaaggctcggcagtccaatcggcatcgacccaatccgccattaatcaatcgtcacaatcaactgaaagtaaaccagttacaccgcccactacgacgccccaaccagtccttgaaaaggtgagcgtcaatgtttatggaccaattagtgaaggtaatccgaaatggttgaacggtgatcaagttgaaatcaaggatggggatatggtgattgatgttttaaaacgtgatttgcaaagtcgcgggatggcactatcctatcgtgggacgggcggcggcgtctatatcaaaggcattaatgggctattcgaatttgataaaggaccgttaagcggatggctttatcgagtgaatggcagttttcctaactattcttgtggtaattatcctgttaagagtggagatgtgattgattggatgtatacggaaaatctcgggaacgatcgcaacgcgcctcagggttaaaatcgcaactggtctttgatcaattaaatccaatcgtcatctttgcgtattacgtgattgcaattgcgttctcaatggtttttattcatccgatttttcttgtaagtgaattgttgatgatgattgcagtgaacttgcttgcgaaaaaccagaagaaaacactggggacattgcagggtgcattgttcatgatgctctttatcgtcgtgatgaaccctattatgaataatcatggggcgcacgtgattgcgacgtttggtgggacggtgatcacagcagaggctgtcatgtacggttttttaatggcgctttcgctggcgatcttaatgctagtgtttgtttcctataatcagagtatgacgaatcataagttcttatatttatttgtgcggctttcaccgcaactaactttattaacgatgattaccatgcggtttgtcccactatttattcggcggtttaccaatatcaagaatgtccaaagaacacgtggtgtgcagatggaaacggggagtgttagagcccgatcacatgccgggatgcgtttgatggaagtattattgattaattcattggttgacgcactacaaacggctgattcaatgacggcccgtggttatgggtcacagaagcgaacgagttatcaacgttatcgatttacccaacgggatggttgggtattggcaagtcttgtagcaggcagtgcactttgtttttattttgctaaacaggggattggccgcttagcgatttatccaatacttggctcgattcatttgaatcaaattggttggctatgtttggtgttagtcttattaattgatagtttgccgctattactagaaggatgggaatatttatggtggacattgcgcaaataaaacaatttaattttcagtatgcattggcaacccaacaaaatctgaaagacatcaatttaaccgttcagacgggtgacttcattacgttagctgggaactcgggtagcgggaagaccaccttattgcgccaactcaaaaaagaactctggcccgttggtaaacggtcgggtgagattattttcgagggccaaccgttagctgatttatcgcaagggttaagtgcgcagaagattgggatggtctttcaaaatccggataaccaattagtgatggatacggtcattcaggaactcgctttttcactcgagaatattggtgaaaagagtgcgaatattcaaaaacgaattgccgaattagtcagctttttaggtttccaagatttgctgtatgcttccgtgcatgatttatcgggtggccaaaaacaactggtcaacctagcgtcggttttgattttacagccggatcttttactgttggatgaaccaacagcgcaactcgatcccattgcgaccaaagaatttattagtttattgcaacgggtacatgacgaactcggcatcaccgtgattatcagtgaacaccagttggatgatattttaccgctctctaatcaactttggttgatggatggcggtgagataacgtatcaaggaccggttgctggtggattagcagcaatttgggcgcaaccggcattgcgtgaattcgtcccagatgtgccacacgtctttttacaaaatgagttgattgcaccagctgatattgcggcattaccattgaccgttgtcagtggcaagcaattgattgagcggcgacaatggcagttaacacatactaaacgtgaaatagccacgaacgaccaagcaacaatgctgcaggccaaacatgtgagttttcagtatgaaaaaaatgacccttatgttttagaccagctcaatctagaggttcataccggcgattggttagcgattgttggtaaaaatgggactggtaaatcgacgttgttgaagcttttgattggtttattacaaccgcgccatggtgcaatcaagttacaggggaagaagatcggtaagtgggcgcaagctgaacttttcaaaacagtgggttatctctcacaaacaccgagcgatcatttcagttatgatagtgtccgtcaagaatttatcgaacgggcgcggcagttaaaacgcgcaacaccagaacaagtggcagaagagatgctagcaaagctcggtcttcaaacccttgctgaacgtaacccgcaagatgccagtggcggcgagcaacaattgattgcactcgggattgtattgctagcgcagccgcagttactcttactggatgagccaacaaagggccttgatccgattcgcaaacgggcgttgggtgaattgttaacgcgtttacaagcggaaggcttaacattgattatggcaagtcacgatatggcctttagtgcccggtttgctagtcagtgtgccttattattcgatgggacgattgtatcggaggaagaaccttatgcctttttcgcgcataacttcttctatacgacaaccatcaaccgaatgttacgcagtcaattgcccgaagccctgaattgggaagaggtgcacgcatgaaagctttaaaaaatagttggaccacgtttggattggctttcttgattatggcgattttcatgttgtttatcgtcactttaaaaggacagcattttctgatcttcagttttatctgtttgattgccagtatgctgccattttattggcggtttgaaacccgggatattcgcgcccgtgaaattattttcatcgcggttttagcggcgattgcggcagtcactcgggtaccatttgcaccattgcccagtgttcagccaactagttttgtgattatcgtgtcggcattagtccttggtccagaatcgggttttattgtcggttcgaccgccgcgattgtctcgaatatgtttttgggacaagggccatggaccccatggcaaatgttttgctggggcatgatgggcgttacggcaggcttaattagtcgccatcagtgggcacagaataaatacttgctctgtatttttgggtttgtctggggctttatttttgggtggattatgaatctgtggtattttgtcgcatacgtcaatccactgacgattaagacttttattgcagcctatgtcgcgagtttctattttgacttggcccatgctttatcaaatgttttttttattttcttcttttatcagtcgtggtaccgaatcatcagtcgctttaaagtgaagtatggtttgttggcgacggaagatgagctataaaattgagccctcaccaaagtggtggggctttttttaacggacatcatttcatacttgaaagttcacaatttggtcccaactgcttggtattctataaatatcagataagcatctcccaagtaagtgaatctgagcaagttaattttatgagacaattcctccctaaagaagtgtcttagcaacacccaatgagttatagtttaacggtagaaccaatcatctaaattgaaattccttccaagaaaatcaaaagcgattggctattaaaagcgaagcgtaaaatgaatgattgatgtgggttcaatccccgcaactcgatgactgttgtgttaaaaaagccgcaaccaatttggttgcggcttttttgcgtttagtagaccaatccctgtttaccagtagtatggccagttaacagtttatcagtaatcatttggagattagcgaccgttaagcctgtgtagtgggcggtggtgattggatgcagaatccgcgcatcgattagccgcgcaatttgttggagaatcgccccttgactagtggtttggaattgatagtccgttttagtgaacatgtactcaaatgaaaatgaggctgatttaggcttaagcggtgcgagatcaagtggatgcgtattgccaacaatcgtaccgacttgtccaaacggtttaatcagccgtgcgacctcttggagatagctttcaatatcataaaggaccgcgatggcatcaaaggtgttatccggaagactggctaagttgtctaagctgctaggtgaatgataatccagcgggtgatcaactccgtttgtttttagccagtcgaaatgagtgagactgcttgtggcagtgacggtgaatccggcccacttggcgagttgactgagaattgatccaaccccaccggcaccattgataatcaatagttgtttgccacgattggcattttgttcagcggtaaaaccaagcttttcaaaaagtaattcataggcggttaacgaaacaagcggtaagccggcaatctccgcggcactgattgtactaggcgcaagcgcacaaatcgcggccggaacacattgatagtgttggaaactgccatcgatctgggtactgccagcatagaagacaacatcgccaggttgaaagttggtcacagtggcgccgaccgcttgcacggtaccatacccgtcatagcctaaaatggttgtggtgctagctcgtcttttaaggtcgacagggttgacgctacttgccctgactttgatcagtagctcttcaggtttaggcgtagggatttcaccagacactgcgtgccaattatgttcggtatcaagttggatttggtgattagtggtcatgatgacgtcatcctttctgaataaaatggttagtctaagcctactgctaatcaccgcataatacaaaaaaagacgcccaattaagaacgtcttgagttcatttaaattgcttcaacagtaacttcttcagttggttcatctgcagaagttgtctgtaaaaattgatcgcctgcaagatctttgtagaatgccatataagttgcattcttatatggcgttaaccagaaatagccaatgccaagtgagaggccagctaaaatatcccaacctaagaagcttagttgtaagacgaaaaaccggaatttatgcccattcattaactcacgactcttagtgatacaatctaaaaagctaacgtcagcttgtggatcgttatctgttaagtccttgaagatataagaagcttgagaataagcgtagcctttaatgatccccggaataatgaataacaatgcccaaaggaatgtaaataagctagctaaaattcgaattagaaaagcgcccaagaaataacgttttgagaagacactgaaagctcctttgagtgaactaaaatcagcatctttcgaacggagccaatctaagaaagtaaaattaatcccaagtgtaatgagccccaaaatgaaacttggaatttgaccagcaaaactactaccagacgaatggcccgaaaaagattcattggcagccattgatgggtcggtgtttgcgaagatggcaatcatggccatcaagactgctccgacaataatcaccccaataattgatagcagagtggggatgatgttcaacgtaacggcctttccccaatgaccagcaaataatgacttaacttcttttttaagtgaagcgcgtgattgatactctctttccatgataattcctcccttactacgtagataaattatactattaattaatggctgaaatcaatttatttttaagtatctttgaaaggattgttggggattagttgttgaatgcactggtacatcaggtattctataaataatagcacatcataattaaatagtgtaaaatataaaattaactatttttgttaaggggatgtatagaatgaataagggtcgattagaagcatttagcgatgctgtcatcgcgattattgtcaccattatgatcttggaatttaaaacgccagaaacaccggaaattaaggcacttttggaaaatggtccctacttttttgcgtatatcattacgtacgttttcgtaggggttgcttggtataatcattactatatgttttcgctgacgaaacgaggaacaaagcgtatttattggctgaataatatttggttattatccatgtcatttttacccgttgcaacggcttggacggggcggttcatcaatgaacgcggtccggaatatttttactacgtggttcatctgatttggttattggcctacttcttcttgagtgatgcattggcgaacgccaatcgtgaagtcgcccctgagcggtatcaaaaaattaaagccatgccgatctatagcacgattactagaccttatttctgggtgattcaagtgattctattagtcgctatttatttctttccacccatcgaattaattttcgtaatggtcgaaatttatacgattgggaatcgtaccgacaaagaaagtgatcaattattcaatgattaaaaaaacaccgctagcctattaggttagcggtgttttttgggagatctagaatttaataacaactttcccggttgagtgattcgtagcacttagttgatgggctttgatcaagccatcagcagaaaatgggaagacagtatcgataattgatttgactttaccatcggccattaatgcggcaatctttttaagttgatcaccatctggcattaaccagatagctttgaaagtcatattggtatctttaatgatggccgcagtttcaggcgcttcaccaacgattgaaatttggcgacctgtttcaggattgaggacagcccatgcatcgacttgtccttgacccccgatagtgtcgataacgagatcgacattgtgggctttatcggccactttttcagttcgatagtcaatgatttcatcagcgccaagttcacggacaagatcgaagttcttcgcactagttgtggtgataacgtgggcgcccattgcttttgcgaattggatagcatatgaacctacgccacctgaaccagcttggaccaggacggtttcgcctggttgtaggtgaccgtggttaaagagtgcttgccaagcagtttcgccagctaatgggacggcagccgcttcttcaaaagtgacattggctggttttggtgcgattaagttgtcatcaacggcaacgtattcagcataagtaccacgatttgaagtggcaggtcgtgcgaaaacttcatcaccaacgtgccattctgttacggctgatccaacggcaacaacgaccccggaaaggtcccagccaagaacgattgggaattcccattggaacatgcttgtgagatgaccttcacgtaatttccagtcgagtgggttgattgctgtcgctttagattgaattaggacttggtgttcaccaattgtaggcatcggtaaagtaatcatttcaagttggttttcgtcaccatattgttggatggcaacagcgtgcattgtttctgacatatgaatagcctcattttcttattattagtaagtgtagtgtaccaatcaaatggttgttaagtcaattaacaggcttaaaaagtaaaagaaaagcacccaatttggttaattggatgctcagaaaataatgctgttaatcctcaaaggctaacctgtttgagtcagcactctgtatcaaacgtgctttttaaagctgcctcttgcgcttagccacgtacctgtaaacgatcgtctttggcgctcattcacggtacgattctaatgctcagaggcaaaccgctttaaacgcactttatatcaaacgtgcttctcaaacagccttttccggttaactacaaaacggacatcatggctgagacccgccataatgcccgtttttacgttaatcctaaaagtctaactcgtttgagtcagcactctatagttcttcttctgctatttttgctagtgttgtttttgatgggatgaagaatagggcaccagttgttggttcactgaagtcgagtaggtggtcataattgccggctggtttgccgacgaacatattggttaacatgcgttttgtcactgaccatgttcgagaatagccgataaagtaagtaccggtcattttttcgccagggtttgcgtatggaacgttcatgcgaacaatcttatgttccacaccgccttcgttatcttgtgagacaacgttgtgcgcgttggttggcttttcggcgtcagcaagttctaagtcagaaaactttttgcggccaattgttttttcttgttcttcagttgaagtatggttccagctgtccatggcatggatatatttctgtgcaaaagcgtatgaaccgttgatgaattctggatcttcatcgccgactaatgcgtatttagcagtttcatcgatagcgggattttccgtaccgtcaatgaagccgatgatcgcgcggccttcgaagtaacggaatccgtgtgtttcatcaatcgttgttgcgttatcagaaatgaattgcatcatttgatctaatacttcataacaaaccgccatttctttggcccgaatatggaagaaaagatcacctccggttgcgacggcatcatgtttagggcttggaattgccttgaagggttccaattcctttggttttggtgcgttagggaataagtaatcccaagcatccgagccaatcccgaaagccacgcgtaagtgggcatctgggtaacggatattcatgctattgatgatcgctggaatgcgcgctgctaattcggtaacagccgctttgtccgcctcggcatcttgccgattcaatttctgggtgacgaaaatgatgttctcgccagcatctttaaaaacgtcttgtgcatctgtgggtgtaattgccatgttcagaacctccaaataaaaatttaaagttagttatttataatcattattatctagctcagtgcaagcataccaaaaaacggttttttttaccagtcccaataattaaaaaaagacatataattggtagtcatcctgaattctggataactaccaattttttattaatgctcagttgctgaacgcaaccaaacgcactctattcttaaacgtgcttttttaaacagcttcctgcgcttaaccaaatttgccaaatcgccgattgcatcggtaattcgtcaaatcctgttaatgctcagaagctacccgtttcaaacgtactttatttaatttctgctaatgtcttttcaagatgggctaggacacggtctttacctaacaattcgattgaatcaggtaatgatggaccatgcatttcgcgagtcgttgcaatccgaattggcatgtacaattgacggcctttaatcttcgtatctttttggatgcctttaatgatttgcataatccgtggtgctgtgaataatgttaaatctttcaagcgttcgctgaattccttcaaaacaacggatgctgtttcgttatttaattcttcaagcgcttcggcgtctaattgttcaggttcttcaaagaagacatctgacatttcaacgatttgagctgtgtagctcatttgatcttggtataacgcaatcaaatgacgggcccattcgatcattttgctatcaggattttcagcgattttacccgctttaatcaagctttctaacgaaagatccatgattttgtttggatctgattgtttaacgtattggttattcacccattcgagtttcttttgatcgaaactagctggtgatttgctcaaacgttttggatcaaattgtttgatgaattcttggcgattgaacaattcgctttcgccaactggtgaccaacctaatagggcgataaagttaaacatcgcttctggtaagtaacccaattcgcggtattgttcgataaattgaagcactgattcatcacgtttacttaacttcttacctgtttcagtattgatgatcaatgtcatgtggccaaagactggtggttcccaaccaaaggcttcgtagacagccaattgttttggcgtgttggcgatatgatcgtccccacgcaagacatgggtgatttccatcaagtgatcatcaacgacaacggcaaagttatatgttggcatcccatcgcgtttcatgatgacaaagtcgccacctaaacgatctgattcaaagctgatttcacctttaacaatgtcatcaaacttgtaaacgtgatccttaggaagacgtaaacgaacaactggttgtaagccttttgctttagcagcttcttggctagccttaatttcatcatcactcataccttcgtattcgtagatgtaacgtggtgcttcgccagctgctttttgggcttcccgttcttcagttaattcatcttctgttttgtatgattcgtaagctaatcccttagccactaactcttcaattaaaggcgtgtaaatttcgcgacgttctgattgacgataaggaccaaagtcaccaggcttatctggaccttcatcccaatccatacctagccacttcaaattatctaactgactgttttcaccgtcagcaatgtttcttttcgtgtcagtatcttcaatccgaatcacgaaagtccctttgttgtgacgtgcaaataaatagttaaacaatgctgtacgagcattcccgatgtgcaaatgacctgttggacttggcgcataccgcactcggattttattttttgccataaaaaaaacgcctctttctaaaattatacttgtctactagtttaccgttattatgcctaaaaataaaggctcagagaccactaatccacaaaaaaagaatctaggacaaaagtatgtttgtcccagacccttcttctgatagtagaattctatcatttaaacgtgctttttgaaccatcttcctgcgcttaaccaaatttgccaaatcgacgattacatcgtcaattcgtcaaatccagttaatgctcagaagataaccagttcaaacgcactcttccacttaaacgtgcttacactaactgcctcctgcgccttgctacatcagtcacatcaccggctttaccggcaatccgcctgattaggcaaatgcttaaaagcaaaccgttagtgacgcactctcaccgcattaacggagtggtgtccattgccattcttcaacttctggtaaatcagtaccttcattgcgaatgtattgattgtgtttagcaaccatgtcatccattgattgtgcgaattgaccagcttgatcaccaagtacgtcacctgcaacttctttagatagactgaaacgatccatttgattcaagacacgcatgtcgaatggtgttgtaatatcaccattttcacggtagccatgaacatgaaggttatggttgtgacggtcaaagaagatatcacgtactaagccttcgaaaccatggaatgcgaagaccactggtttgtcttttgtaaagtacatgtcgaattcttcatctgttaaaccacgagggtccactttaggtgaacgaagtttcaataaatcaacaacgttaatgaaacgaatcttcatgtcaggatattgtttgtgcaagattgagattgcagccaaactttcaagtgttggttctgtcccagcagctgcaatcacaacatctggttcagcatcttggtctgtacttgcccagtcaataatcttcaaaccattcttaactaagactgttgcttcgtcaattgagaaccattgttgacgtgggtgttttgaagcaaccactaaattgatcttttcttggctcttgaagacagtatccattgttgctaacaacgtgttagcatcagcaggtaagtattcacgaatgaattcaggtttcttttcagctaagtgtgttaagatacctggatcttgatgtgtgtaaccattgtgatcttgttggaaaacagttgatgtggcaatcacgttcaatgaaggatacttgttacgccatgcttgttcatcagccttacgtaaccacttgaagtgttgtgttaacattgaatccacaacgcgcaagaatgattcgtaacttgcaaagaaaccatgacgaccagttaggacataaccttctaaccaaccttcagcttgatgttctgataattgtgaatcaagaacacggccttctgttgccatgtattgatcgtttggttctttgattgattccatccattgacggtttgttgcttcaaaaatatggttcaaacggtttgacattgtttcatcagggccgaagattctgaagtttttattttgatcgttgtctttgatgatatcacgaacatattcgcctaaaataatcatgtcttgcgcaacgactttaccgtgttctgaattatccacagcataatcacggtaatctggtaagcgtaatggtttaggatcaatcccaccattggtgattgggttagcagccatccgttgatcgcctttaggtgcaatttctgcgatttcaggttttaattgacctgcttctgtaaacaattcttctggacggtatgatttcatccaatctactaatgcatcaacatgttgcatgtcagcactgtcaattggcactggaatttggtgcgcacggaatgaattttcgattggtacgccatcccatgtcttaggaccagtccaacccttaggtgcgcggaagacgatcattggccatactggacgagatgaatcgccgttttcacgcgcattcttttgaattgcttggattttttcgatggcttcatccattgcagcagcagttgctgggtgcatcttttcagggtcgtcgccttcaacaaagattggttcccaaccattgccttcgaagtatttcgttaattcttcatcactcttgcgtgaaagaattgttgggttagaaatcttgaaaccgtttaagttcaagattggtaagacagcaccatcattcttaggattgatgaatgtgcttgataaccatgatgcagctaatgggccagtttcagcttccccatcacccacaacaacagcagcaatcacgtctgggttatctaaaatcgcaccaacaccgtgtgataatgaataaccaagttcgccgccttcatggattgaaccaggtgtttcaggagccgcatgagaagcaacgccgcctgggaatgagaattgtttgaataatttcttcatcccttcaacatcttgagaaatttctggatagatttctgaatagctaccatctaaatatgagtttgagaccatcacttgaccaccgtgacctgggccttcaacgtagaacatgtttaagttatatttattaattgcacggtttaaatgagcatataggaagttttggcctgagattgtcccccagtgaccaattggttttaccttaacatcttttgcttccaaaggacgtttcaatagtgggttatcttttaagtataattgaccaactgagatataatttgcagcccgccaaaatgcgtcaactttagcaaggtattctttgcttgaataatctgtcattttaatagcacccctttttaattttaaaaaagttcctaatagctttactttaagttccagtcgcagcttttgcaactttgttgtttctgactactctcttatcatactaaactttttaaaaaagtcaaccatttttaatattgggtcgtaccaattttttgaatctaaaaatagcggccctattcgcgaccgctaaccgtaacgaatgtattatatttcatgtattggtagtgcaggcgcatcgttgaaaattcaaacggtgtcccatcgtctaagaagaaaatcccttccatgatgccaactggttccgtcggtttcaactttaagtgcgcttgatcatcatcagttgatggttccgcgaaaattgacaggaaagcgcgtgtgacttcttgatttttctcggtttccaagtagttaaagattgaactcgacacaattttttctgtcaattcgggcattaccttaatcggaatgaagcccgtttcaatcatgaatggttcatcatcaaacaaccggagacgcttgatttcgtaaacaaaatcatctggtttcaggaacaagtctcgttgcaattccgcgctcggcttgatgacttggaaatctaataatttaatccccggtgtccgattaccggctttaaaactgtcggtaacccctaggttagagccattgtaattaaaaaacgagccaccctttaaataaagtggattaataaaggttcctgaaccccgttttttgaaaatgatcccttgattagacataacgtttaacgcacgtttgaccgagctacgactcacttgatagtgttcagtcaacgtccgttcatcgggtaatttcatgctgggaaatgattctgcgttaatcgctttttttaagtccgcgataatattctgataaactaagtcggccatgctaaactcctttataaatcattttatctcaagcttattatacatgattcctaaaagtcgtctacaaacagactcgataaatgttcaattattaatgcaggccaataaaaaaagaggtgctgagacaatgtttattgcctcagcacctcgcgcgctccagatcagactatcttgcaaaaaatgcctcacagcgcctactttttatttaatgtgcttgaaattgggtatagtattctgctagtaattgggcaatccggttcccagtaatggcataattttcagcgggttggttagctaatgaaatccgcaagtagccatcatcagtccccattcctgccccatccatcacaacaacgccgtatttagctgcaagtttatcttcgaaatcaagatagctcacgtgcttttcgaaatagtcgtggaattcatgcccatactttctttcagcaaaatcatagatgttaaataccgcataatattcagcgttttctttagagtgatcacattccatgcccatcgattcccaaaaagcgttgtatcgcgcatcaaccattttcttggaagcttcgatgtatggatccttttcaccttcgtgaattaagctggtcaaactaaatagtgccatcaaaatttgttgtggtgttgataatcccgcggtgtggtacaacgcgatttcacgactgtcagccactgttcgatcaatgaatttcatcgcaagcggattaggcgccacaactgagtaccgtttttcaaaagctgccttaatcgctggttcttcagccgttcgcttagcaataatttcatcaaaaacattatcttggtgcactgctagtaagcctaaacgatgcccagttgccccataaagttttgaatacgaataaactaacatcgtatttcggggggcaattgagtaaattgtttggaaatcattcacaaaagtcccataaacatcatccgtaatgatgataatttctgggtttgcttcaacgacctctttaatcttagctaacgcgtgtttgctgaaagcccgcgaagtggggttcgttggattaaccacaaaaaaggctttgattgtcgggtccttcaattcttcaaacttggcgtccatcatttgccagttgtcatcttcaacggaactcacatcgaattgctttaatttatattcacttaattctgggatttgcaaataaggggtaaagattggggtattgatggcaatcgtgtcgccaggccgtaagatatggctgatcttcaattccttgaacaaataaaccattgcggctgttccgccctctgttgggaagacatccgtttgattagctaatttttcaccattatatagtgacacttcaaggtatttatttaggattttttccacattgattaaacttctcgaaggtactggatagtgattgccaatcgcaccgtcgacaaattcgtgaaccaaatcatcctgattgaggcccatgtgcttttcggtataatctaaaaaggctaatataaatcgatctgttttatgactggcatcaaggtaggcatgcagccgttgtgcaatccctgctttatcaacgtagcccgccatatctccatcagcctcgttaattttcttagcagattcttcgacgccaaattcgacaagcttattaaaagctaatcgcgcccgcgtattaatccagttagggtccccacgaccaacattaattggcgcattatgcattgtatttttttctgaattttctaagaacaaagcggcaacttcaaagtttgacatctcttttaatcgctcaatatctaatgagtgcatcgtttttccacctttttcaattacttgctacattcataatcgcatctaaaagcactttaacgctaattgacagtcaaaataacggctagcattgtaaatttattgtttgatttattatatcgtttttgtctcaaaaataaagcactcattcaaaaatcaaaccataaatgccacagcgattctccaacttcatattgcatcatttaccacaaacctgcaaccctgcggcgggattttttctaatgctgctaaaaaagcacatcatcgttcaacgatgatgtgctttttaaagttttaagcgacgttattccttattttctttgaagaacttcgcgaaatttttgcggtaattgtgcaacatccatttaatcaatagccagcgtttgagattcatatctttgctatattcaaaagtggtgccgtaacgtttttgtttgatgagtgccaatgccttgtctttttcggcattattgcgggcatatttcttaaagacatccactgaaacgcccaaccaaagtgcgggactgtcttcatctttattcgcccaaacaacaggttcatcttgcaagtcgtttgtcacgtaatcgcgcaccacccattgggctaagttatagccgttcaaggtaacaaagaaactactgcggcccatccgtaaattgatgtcgaataacttgtaggtgttatcgcgttcatcatatttcatatcgaggttggcataacccgtaaactcgatatcttcaaggaatttttggacttgttgataaatttgtgcgttgtattccggcaaaatcgccacgtaattcccaatagctgcgggtgctggatcttccaataatggatggcccagacacatcatcttcacgtgatgttgttggtcaacatagatgttcatcacgtgcatccgactgtcatccccaggaatgaagtcttgtaaaatcatgtctgattggtagccattttcatatacttttcgcatgatgtcttggaattcagcttcacttttaatcgtgaaagcttttttgcgcccttcaaaatgcacatcaagccattccacagaatccgccggttttaacgccactggatattggaaaggttgttccacctgattatcttcaaccatttgcttggtaatgatgtgcgtcttgggataaggtaagtcatatttgtcacagatttcatagaaggtttccttataagtcaacttttctagtaaatcgtgatcaatatatggacaaacaaagacatcttccaattccgctttatgttgtgaaattaagctcgcatagccatcaccacagccaatcaaaatgactgggccatcgctatcgcgatagatttcctttaattttagcatttcagtaatgaatccaggatcttcactgaagcctggaatcaattctaaatcgacgatttttgtaaaccgagttggtgctaattcctgacttgcgtaggccttaacaggttcatgatacatctcataaaacgaacgggccatcccgtaaacgttaaaatcgctccccaataaaatgggggtgaagtttttaccgtttgcttgcatgctgtcaccttctatatcaatatttatcgtagtataccagactgccgttcaatatacgtcagctcaggatgctctttgttaaaacttaattagtaattgctacttgttgtatagcccgtcgacaatattttggccgaccactgtcatcggatcaatcactttgtcgggatacaatggaaattccgactgtgcaacactcaattcggtacagcccaaaataaccgcgtcacaatcatagtcatttaacattgtatcgacaattttttgatacttgtcatggctgaatgtcccagtcgccttaatgtcatcataaatcaaactcatcgtggcatcttgcaatgtttggtcgggaacaacactttcaagaccaaaagcagcaattgctttttgataaataccggcttgtcgggttccggttgtgctgagaacaccgattttcttcaagccgggaattgtttgttgcatgtgtttgaccgtttcccgtggcatgtggataatgtcgaaatctgcggcagcttgtaattcgtcgtagaagtaatgggctgtgttacaggtcattaccatgaacttcggcgctaacaaattcatttggcgaatatcttttaacatcacgggcaacggattttcttggctgttgtcgaggatgtaggctgtgcgatctggaatttcagcgtggttgaacacgacgtaattcagataatcttgatccttcttagccggtgttaattcatcgattagatgtacgaaagtttcggttgccgccgtccccatgccgcctaaaatcgtaaacatttcttccatggcaattctcctttacttaattgacttcatttgatgctggttagtccttcttttgaggactcacttcgatacctaattcttctaattgttccggtgtcacttcactaggcgcattggtcattggttctgtggcccgggaatttttagggaaggcaatcacgtcacgaatattgtcgcgactagcgagcaacattgcgaaacgatccaaaccaatcgctaagccgcctgatggtgggaaaccgaatttcatggcatttaataagtggccgaaacgttcttgagccacttcaggggcaacccctaaaacagataacattttttcttggacttctggattaaaaatacggagtgaaccgccacctaattcataaccattcaagatgatatcgtatgaaattgcatgtgccttatgtggatcagtatccaacaatggaatatcttcatcacgtggacgcgtgaatggatggtgggctgcaatccatttgccaaagccttcatcatattcaaataatggccaatcaacaacccatgtaaatgcaaattggctcttatcaatcatatccatttctttagcgaagtgtgttcgtaagtaacctaagctatcacaaaccacttggaagttaccggcaacgattaaaattaaatcatcatccattaagttcaaacgttcaacaagcgcttcttggtaaggtaataagcctttagcagaagcccctgataatttatcaccagcgtatttcgcccacaacaatgacttagcgccgtaacgttcaatgtattgttgttgttcgtctaacgctttccgtgaatatttaggggcggcattattaacgacgattgcgcgcacatattggcctgcttcaacagcttcagagaatggcttgaagtcagaatcttgcacgatttctgtaatatcttgaatttgcatatcaaaacgaacatccggtttatctgaaccatacttgtccattgcatcttgccatttcaaacgtgggaatggtgtttgcacatcgatgcccttgacgtctttcataacttttttcaataaaccttctgtttcggtttgaatttcaacgtctgataagaacgttgtttcaacatcgatttgtgtaaattctggttggcgatccccacgtaaatcttcgtctctaaaacaacgggcaatttgatagtacttatcaaagccggctgacatcaataattgtttgaagagttgtggtgattgcggtaatgcgtagaaactacctggataaacccgtgaaggcaccaaataatcgcgtgcgccttcaggtgttgaactcgtcaagttcggtgtttcgatatttaaataaccattgttatcataatagctgtgaactgcacgagtaatcgcagcccgtgttttaatggcattttgcatttctggtcttctaagatccaaataacgatacttcaatttcaaatcttcagaagccgtattgttatctgaaatttcaaatgggagggtttcagctttgttcaagaccactaagtctttaacaatcacttcgattttccccgtcttcatgtctggattaatggccgcttcatcacgcgccatcactgttccttggacttcaacgacatattcactctttaatttacttgctacttggaaaatatctgcatctgtgtcttgattaaacaccaattgaacgatgccttcgcgatctcttaaatcaacgaaaattaagttcccaaaattccgttggctttgaacccaaccatgtaatacgacttcttggttgagaaattcttccccaactaatccacaatatgttgttcttgttctcatatttgccaatcctctctgaatctacattttataaaaaataaaaaaagcaccctcgtctttcgacaagggtgctttgcgcacggtaccacctttaatttcagctgttgataacgctatctgctagcgggatattcatccaagcctcaaaagctgtcaactggaatcaataagtaactttcaacggggttactctctctgtgattgatcgctaaaaccaagtactttatcgatggctacattttattataatgtccaaaatatatcacaaagccctttaaccgtcaagttttgcagttggattgagctagctggattcgaaccagcgcatgacaggatcaaaacctgttgccttaccgcttggccatagcccaataatgcggcaccaagattaagttggcgccgtaaattgattgaattgaaacgtgctttcattaactgctttctgcgttttgctacgtattgcaaacaatcagctgtgctgattattcacaacactagacaagtgttcaaaagcaacccgttaatgacacactctaaacgtgcttttgatgacaacaatttccgcttaatctaaaattcccaataatcctaaaaacccggattattgggaattttgtattaatgctcagttgttaaccgtcatcaaacgcactctaaacgtgctttggcagccatcttcttccggttagctacatcagtcaaatcaccgactttgtcggtaatctgcctgattaggctaatcctcagaagataaccgactgcctgcgcactctttaaattaccatacaaatagtccgactgttgctgctgaaagaagtgatactaagattcctgatagcaacatgtagccgacgtttttggcaatcatgtcgttcttttcacggtccacaaggcctttgaaggcgccgatgatcatgccgactgttgagaagttggcaaatgatgtcacgaagaccgttaagacagcttggtaatgtggtgcgaagctcccgattgaatgttggactttacccatgacaacgaattcgttggtcaccaacttcgtccccatgaattgtgcaaattcaaaagcgtggtgcacatcaagtcccattaaccatgcgaatgggaacatcacgattccaagtaaatgttcaagggtaatccaagggttcactaattgaagcaccttgtcgatcaaggcagccaacgcaacaaaggcgatgacgtttgccgtgataattaaaactaatttaccagcatttaagattgaatcacctaagaatgagaagaatggttcacgttccactttgccttcaaccatttcggttgcttcaacagctgcggaaccactcccacccattttagcaatcgtatcttcttcgggtgtgactttcactgggtttaaaatattggtgacaataatagcgttaataatgttgaccggaatcgccgttaaaataaattggcccggcatcatttgtgtatatgcgccgatgatggaagctgtcacacagctcattgacatcatcgcaagtgttaatgttcgttctgctttcatttgtttcaattgtaagcttgaaacagctaatgcttcggtattgcctaaaaacatcatttcaactgcaaagaatgattcaaactttggttgtcccgtaatcttagctaacccacggcctaaccatttaatcacccaaggcaagaccccgatatacgttaagatatcgaataatgggataatcatcaagattggtaataacacgctagcaacgaaatccatttgtttcacattgacccaacttggtagtgcaaaagcaatcccagtataggcaacttgcactaaccagttaaagccgtttgctgcacctaaaacaatatcccgcccgattgaaaaactcgttaaaaaccaagcaagcactaagttaatcactaacatgattaagacggagcgccaatcgatttctttctttttctttgagaacagaaagccgactccaataaaaatcagtaatccaacaacatttacaagcaaatacacgacacgccacatccttcatttgtctttttcgtaccgctttaaataataccgttcccccttgtaaatgtaaactattgttcaccccctaattgcataaataatcacttgttaaacgcaactaaattagtccacaaaaaaagcggtccccttttgcaaaggaccgcttttccattcatttttaatagcccgcattccactgatttgtagactgttgcgtttgccaagtattggtcgtgttactgtaatcgttgttaccactataagttgcactgttcgagtagccatagttactttgcgtcgtcgttgcagcactctttccaccattcatgacactttcagaataaaccgtaaactcttgatgattttcttcacctgtaaagttggtattcaaatcgttttgtttggtttctgcgttgttaatcgttgttttttctaatcccagtgacgttctcaagacatctgaaacgcgttggatttcttcattggttggaatctgatacgagctaccatcaatatcagcattacgtccagttaaaacatcagactcaattgatttagctgcctttcgataatttgcttgaatcgctaccatgtcatcaaaactgaggttagtggcaacactatctgacaaggagtctaagatagattcaaagttggtcaaagatttaagcgagactgcagaattaatcatcgacgtgataacttgtttttgccgtttttgacggccataatcgccttctggatcatcgtaacgcattcgtgagtagtctaaagcggcttttcctttcagatgcatcttgcccttagtaaactcgctcccgttccattcgaacgtaaatggtacgtcaacatcaacgccaccgacagcgtcaacaatcttcgataagccccccatgttaaccgtgacatagtaatcaattgggacatcgaacatcttttcaaccgtcgacatcgccatatcagaaccaccaacattataggcagcattaatcttctgcatgttaaattcatctgcgccttgtaactgcgctagcgtatcccgaggaatgctgaccaacttgacctgctctttatctggattgactgtcgccacaatcattgtatcggaatttcctttatcaacccggccctcagcaccagtatccactccgagtaataaaatagagaatggttttttatgtttaatcgttttagcggcttttttagtcgcatttggtttataaattttattcgctgcagacttcacttgattactgatgcgtaatgcatacgcgccgccaccgaagaggactagcgttagaatgagtatcaaaactttcatcgtgcgatgctttttaacttttttgtagtttgcttctcgagatccgaaaaatttagaattctgcataggtgtttcccttctattatgtatcataccggcattaataatgttatgttgctattatagcggaattatcatttcaaacaacgccttttaagaaaagttacacaattttaataattccttcaattgttgaacaacactttcctaagcgcttttatgctaaaatgtaagcaagtcttaattatggaggtttcatatgtcaactcaacaactccccatccgcgatgctgttccagaaaagctcacatgggacttaaccacgattttcaaaaatgatgcagcttttgaagtagcctttaagaaagttaaaacgcaattacccacactcaaaacacttgatcgtccgtttgaatcggctgatcaattagtcgctacaatcgaacaaatcttagccactttccgccagctcgaaacaatttacgtttatgctagcatgaaaaatgatcaggatactgctaacgcaacttatcaaggctatcaagcccaagtggacagcttagcggccgaagtttcagcagcagcggcctttttagagcctgcgattcttgctattccggctgggcaattagcagattggcttaccaagacgcctaatttagcagtttacagccatttcattcaaaccattaccgatagtcgagaccatgtcttatctgggcaagaagaagccttgttagctgctgccggagatatcttcagtgctgctagtcaaaccttcagcgtcttagacaactcggatttacaattcccagaagtgactgacgaaaacggacaaacgttgcagctttcagatggggtctacagccaacttttacaatcaaccaaccgatcagtccgccaagcagccttcgaagcactttacaaaacttatggtcaattcaaaaatacatttgcgacgacgcttgccactgaaatcaaaggtcataattacttagctcaagtccatcactacgatagtgcacgccaagcagcgctagcacccaaagcaattccagaagccgtctatacaaccttggttgatcaagtgaaccaacacttaccacttttacatcgctatactgaattacgcaaaaagcaacttaatttatctgaattacacatgtttgatctctacacaccacttctaggaaaacccgcattaacctacacttatgagcaggcgcaagcaactgccaaagaagcattgtcgatcctaggacccgattatgccaaacaagttgcccatatttttgatgaccgcttaatcgatgtttgtgaaaaccaagggaaacggagtggcgcctattctggcggcgcttatgacaccaatcccttcattttattaaactggcaagatgatttaaacaacttatacacattggtccatgaaacggggcatagtgtccacagcgccttcacccgtcagacccaagattatgtttatggcgactatccaattttcgtggccgaaattgcgtcaacaaccaatgaaaatctcttaacggaatatttattgcaaacacagtctgatcctaaggtccaggcctatctattgaactactatttggatggttttaaaggcactgttttccgtcaaacgcaattcgctgagttcgaacatgcgatgcatgctgccgctgccaatggtcagccactaactgccgagttcatgtcacaacaatatgcggacattaatagccgctactacggacctgccgtcgttaacgatccacagatcgcccttgaatggactcggattccacatttctatatgaactattatgtttaccaatacgcaaccggctttgctgctgcaacgactctcactaacggcattagcaccaaacagcccggtgctctcgatcactatttagactacctaaaagctgggagctccgcctacccaattgaaattatgcaacaagccggcgtcgatatgacgagtgccgactatctcgaacgcgcttttgcagttttcgaagaacgtctggatcaactcgaagccctacttgctaacctaaattaagcctcatgaaaaaacgccctcaatgattgaggacgtttttttaacggctaattcgtcgatgatataacaatgcaataaagtaaaagccaaactcaatcgtggcgatgaagaaggtcactggccagttcgttagataaccaagccataaaccgagccaaacccctaataacgctgcggcaaccgagattgccaacatcccgggtacgctcttcgctaaatatttagcaatgaacgccggaatcgtaactaagatgaatactagtaatgaccccacaatctgagcagcaatgctgacactgacggctaataaaattaagaaataaatcgatagtaagttggtctttaaaccttgtgcttgagcgccaatcggatcatatgaatcaaataccaagtaccggtaaaagatcaacagcccaatcataattgccccagataagatgattaattgataaacatctgctaagctaatgccaataatcgaaccaaataaaatattggtagcataactagcatttcggtttgaaagggataaaaagagaatccccaaaccgacaaacagacttgaaatcgcactaatcgacgcttctcgccgtgattctttggcactcatctgaccaatcgtgattgaactgagtaacgtgaacaataacatcccattcaatggtgcaattcccatgaaaaccccaaatgaggctccggcaaatccaatttcagatagggtatgcgctagaaatgacatgttccgcgcaacaacaaataccccgattaaaccgcaggtaattgcgataaaagtactggcgacaaaggcatgccgcataaaatcaaaagttaacactcgcttatcctccgctttaatctaattccaaattgggatccaactgactcattggtccggcttcatattgacctcgttttaaaaataggtattgatccgtgtatttccgggccaattctaaatcgtgggtcacaaaaataaccgtcaaaccatgttcccggttcaactctgcaaccaaggccatcacttcttctttagtttcaatatccaaactcgctgtcgattcgtctaaaatcaacaagtctggtttactgattaatgcttgggctaaatacgctttttgcttttcaccaccagaagcattccccacggtcgtcttttgcaacgcggttagatgggtctgttctaaaatttgatcaagcgcttggcgttccttgcgcgatttccacggtaagtggctatcaagttgattcaaactcacaaaactacgaatggacaacggatattcagcttctaaatttctaaactgtggcacataaccgatgtttagcttttgcttatccgggttaaaaacgagttgtccttctgtcggttgtaaattaccgattaataggcgcaccaaagttgttttgccaaccccgtttggaccgattaaactcgtcatgctaccacgtttgatcgtaaaactgagatcttttagtacttgtcgattactaaaggcaagccctaaatgttgtgcattcactaattctgtcattttgaatcctgagcctttctaactgcatcaaattgctgttgcatccatgttaaatatgtttttttagcgggtagtgtttcagttacttgtacaactggcaccccttctttatccgctagttcgtgcatttgtttaataatgggactttcttcttgcttattaatcactaaaaaggcaatctgatgggttttaattaaatcccgcatcgttgtaatatcttttggtgatggatcggtcccatcttcaattgctttggcaaagtgttggttagcgactttgtaacccatttcagccaatgcatagtcaaaaacgggttcactaacagccacttgttttcctttggcctgcgcctttagttgttggagttgtgcgtctaacgaagctaactttttaagatacgccgcaccattttgctgatacgttgccttatgtttcggatcgcgcttgctaaattcagtcactaatcgcttggtcaatgttggcatcgtctttaaatcataccataaatgttcgttagcgccattagattgtttcattaattgactgactgtcaacacagtttggtcatctggttgggcactcttaacgactttgtttaaccagctgtcgtaaccaagcccgttttgaatcacaatatccgccttagccacgagtttagcatcattggttgttgcttcgtatgaatgtggatctagactgggactattgataatcgacgtcacgtgaccttgattacctaaaaccgcttgtgcagcttcaccataaaaatcgagtgacgatacaacttgaatcccactcgccttttttgtactctgaccacaaccagccactaatagcattagcagtaagattcccgccatgattcccaaaccttttttacgcatctttttctcctcttttctaaatcgtaattattacgttttactaaaaatattttacacgagtctcactaattgtcaatcatttttctgaaaacacttaaaaagggattgggacaaagattgcttttgccctaaccccttttttgaattgttgaactttaaacgtgttctgtaagtcattctcctccggttaaccctgagtcgcaaacaattactgcgtaattattcacgccctgtgttaatcctcggagcatcgacttaagccacactctttaattaccagatttgttccactgcacctgttgcttggacaacaaaataacctgcccgtggttgatcttcgtttggtacgtaaatattaatgagatagccttgttgcccaccgcgtgtgattaagccattattcaaatacgatgcggtttgaccaaattgtgagccaacttgttgaaccaccaatttaatcgcttggttgccatctacggcagttgtttgttgtggtgtcgtggtagtcgttgttggtgcactgctgctagattggctcgcagattgactactgctacttgccgttgtagcagttgatgatgattcagcaacacttgcagttgatgaacttccttgtggggactctacttcagttgaagatgccatcgccgctttggagctcgcttttaattggcttgcactacttgaaagttcactttcgcgttttgcaacgctactttcacgtgctttaagactagccgtggttgaactttgcttggcatcagcatcttgatttgccgtactactttgaccacaagcccctaataatagtagtcctgataccaaaactgtactaactgtaaccatctttttcataataccccctccaactcctattgattcatctttattctacgagacccacctcagaatagcaattaaatccacatctgatttaaaaatctttaagaaacacgctgattagcttaacttagcagccacttgcttggcaatcaccatatcagttgggtatggtgtatcgaccccgcgtactttctgataagcatcggcccctttagccgctaagacaacaatttcgcccggtttactttccgtaatcacctgttcaatcgctgttgcacgatcaatttcgatggtggttgtcaccttatcctggtcaatccctgccaaaatttcagcggcaatggctgctggatcttcaaatcccggatcatcagtcgtcaaaatggcccgatctgcatattcattaaggacctgtgcaaacccagcacgtctagaaacacctttatcgccaggactaccgacaacaactagtaggcgtggttgattgtattccttttgcaagaagctcaagagcgccttcatgctggcataattatgcgcgtaatcaacatatacttgaccatgtcctggaacggctaaggtttccatccgtcctggaatctgcaagtcgcgaattccttgttgagctgcgattaaatccgcccctgccaaaccagcaccaatcactgcagctgtcgcgttgctttcattgaaatccccaattaaacgcagttggtaatcaccagaaacaccaagttgaatggctcgttcagaagccgcggtaactttaaaccgactttctgctaagcccgtttctagattttcaaagcggaaatcaaccgccacgggaattgtaggttgataatccgtttcggcaaataagtaaattgattccggagcagtcgtcgtagttgctgcagcatacacatccgcaaaatattgtgtttgcgcgttaatcacacagtgtcgtgagttgaccaataattgtaatttgcagtgtaagtaatcttcgaaattaggatgttcatttggtccgacgtgatcaggtgaaatgtttaggaaaaagccaacatcgaacgttaagccgtacactcggtttttcttatacgcctgtgacgaaacttccatcactaagtgcgtcatcccgttttcaactgctttgcgcatgtcgcggaataaatctaaactttctggtgtcgttaaatccgatttgaagcgatcctctggtttaggccctaagacacgatcaattgttgaaaataatgctgttttttgacgggtcgccgcttgtaaaatcgattgagtaaagtaggccgcagttgtcttgcctttggtcccggtgtaagccacgataaataaatcatcttgtgggtaatcataaaaagccgctgataaaaccgccatcgctttttggacgttcgtgacgattaaggcgttcatcccgttgccttcaacaatcgcttgttcggcaacatatgttacggcccctaattcttttgcatttgttaaatagacgggacgaaaattccctttacagaaaaagagcgtatcctcagttacctgccgtgaatcatacgcgatgccggtcatatttaaagtcgggtcaccattaagcgccacacttttcaataaatgatgctcttttagaattaacgtacatgcatctaatgttaaagccattttcgtcctcctcaaaatccttgtgaatggttttaattatagcacgatttaatcatgctgcgcttgaaacggcttataatcgtagccataaaaaaacgcgccaccgttaagtgtcgcgtttcaattccaactaaaataggttcgtgaaaaattctttgatcccttcaccgattaaaacaaataaattggctttggggtccgccgttttagtgcgtaattgtgattgtggcgcttgtccgatataccgcgtagtgacaccgttcaattgtggcatcacttgaccaatttgcacattctttttaataggtgcttccaattggcgttttgcaccacctttgactgcttggtaatgccagtcaatgttggctgctgtggttccttttggcacccacattgaaatagctttgttcgtaatcaattgcactgtcttttggcgaccatatttaaccgtcgctgtcttataaggtgcgagactctgattggcttgtgccaattgtttttgttcccaaccatcgaagacatattgcattaacttgttagtttcaatgaaccgccggccagtatcttcaccattggcatgcatcaccactgttagaatccgttgcccatctttcgtcgcagttccggtaaaacaatcgcccgctttgtccgttgtcccggtttttaaaccatcgaccacgtagtcttgcggtgcattattttcgccaggtaacattaagttccacgttgacatggccgtttcatcacttgtttgggcgccaaatgtaaaatgcgcttgcttggttgtttcgagaatttcaggataatcagccaacaacttttgcgctacgagtgcgacatctgccgcactcatttcattttcagcatcagccggactgcctggataaacttcagcgccgaggaattcattgttcaagccggacactgaataaagttgtgcgtcttgaatgccccaatccgccactttttgccgcattaaatcgacaaaatccttttgtgaaccggccacttggttggcgagcatcatggctgcatcattcgccgaagcgaccatcatggcttggaaaagtgccttgacggtatattgtccgtccgcttgtagaggcacattcgttaaatccttattttgactcaattgataaatgaggtcatcgggcttcaccgtttgttcccacgttaacttaccttgcttaatttgcgctaacacgatgtaggctgtaatcatcttcgtcatcgaagcgattggcaacgcctgatccgcattttgttcgtataagacttgtccagttgctgggtcgagcgcaattgctgcactcgcatcgatttgaggggtggtcggcaaactcaccggcgtacttgccgctgcaactttggtagtctgggcactcaaaagaccgccaacgggtgcaattgccaataggccgaccattacatattgtactaattttttaaacacaacattactccttaactgattttgcgccagcagtttgaggatcaatccgccgacctaacttcaaaggtaagtgtatcacaaaactggttaattctggcgtcgaatcagcataaatataaccgccatgtaacgcgacaatactttgggtaattgctaacccaagtccagtgccacctgtttcttgtgaacgcgatgcttcaacgcgataaaagcggtcaaagagttggttcaatgaatcacttggaatttgttgaccatcatttgacactttaataatcgcctcttgaccgattttttcagccgccaacgtaatttgtttgccacccttgccatatttcaaagcattagcaattaaattattgaagactcgaccaagcttttcagtatcggcttccatcatcagtggtgcaggattacaagttacattaatctgcatccccttcttattcgcttctaactcaaaactggccgctaattgatctaacatctgctccatatcaaacgttgtcttggtaatgggagtcgatgtttgccgcaccttcgtgtattcaaataaatcctcgactaaaaccttcatttgttgcgccttcacgaaagcagtatgcgtatatttggttagttcttccttggtttgatactgattatcttcaattaaaccaagatatccgatgattgaagtcagcggcgtccgcaaatcatgactgacattggtaatcaattcgtccttactcttttcaatcttgcgttcttcttccattgaacgcacagtactatcaaccagcgtgttcacactatcgatcacgcgttgcaaatcacggttgacacgcaaattaatccggtggtccaaatgaccatcggcaatgtaatgcaactcaccaatcacgtgccacatctgcatttgatggtaacgccgaataagccgccaatagacgactaacacatcggcaacccccatcaagatgacaaaccaattttgccaactccaaatatgccattcattcggaccaattgtaatggcgtttttaatcatccatacgccgccgcttagttgcggattattcacaatcgcctgttgtaacagcaccatgattgataaatttaatagtaataacaaaataaccgtgatgataccctcggcaaagagttcgctcttttccttagcggttagtgccactttttgcaggttcttttctccttgatagtcagccattaaacttctaccttatacccaacaccccagacggtttcaatcactttttcaccatcggttgcttcttcaattttgtcgcgcaaatgacttacatggaccatgaccgtcttggcagagacgatactttcttgtttccagacccgttcaaaaatatcgtccgctgaaaagacccggttggggtgactggcaagtaagtataaaatcccaaattcaagtgcggtgagttggatttgcttgttattaatcgtcgtcacttcatgtgagtcgcgcttaatgataagcggaccaacttctaagacatccggcacttcgttggccacttgttgttggctccgccgtaacaatgacttcacccgcgccatcacttctaatggattgaatggttttgaaacgtagtcatctgcaccggttaggaggccttgaatcttgtccatatcagttgtcttggcagacaccacaataatgggcacttgtgaatccttacggaccgccttaatgacttcgataccactcatattcggcatcataatatccaagatcatcaaatcaatatcgggattcgtggcaattttagtcagggcttctttacccgtgaaggcttgaatgggttcgtaaccttcgtttttaacataaatacttaataattcaacaatttctttatcatcgtctacaattagaattttcataatcgttacctcgtttaatttaacatcattttgcatgattcgctttcattgtaacaaactatcttctacttagagttaaagaattctttaaatcctccccatcatttaaccacaaaaaaaggatttaagtcgtgcaaaacgctcgacttaaaccctgatagaaatgatttgaattaacgtgctgaatagttaggtgcttctttggtaatttgcacatcatgtggatgtgattctgtcaaaccagcatttgagatttggacaaattgtgcattatcttgtaggtcctgtaaattagcagcaccaacgtagcccatccctgaacgtaagccaccaagtaattggtaaattacatcgccgagtgcgcctttggcagccacacgaccttcgatgccttctgggactaacttgttggcttcattcacaccactttggaagtaacggtctgatgaaccatgcgacatagcagccaagctgcccatcccacggtatgttttgaaacgacgtccttgatagatttcaaattcgccaggtgcttcgtcagtcccagctaacatactaccaagcatcacaacgtttccaccggctgcaagagctttaacgatgtccccagaatatttaatcccaccatcagcaatgatggttttgccatattcgcgggcaacactggcagcatcgtagatggctgttaattgtggtacaccgacaccagccacaatccgagttgtacagattgaaccagggccaatccccactttaacgacatcaaccccagcatcatacaaggcttttgtgccttctgcagttgcgacattcccagcaatcaaggttgcttcagggaagcgttcgcgaatttcactaatcttacgtaacacaccagctgaatgaccatgcgcagtatcgataatgatcgcatcagcccctgctttcaataaggctgcagcccgttcaaaagtatcgcttgtgacgccaacagcggcagcaactaataagcgaccatattgatccttagccgcattcgggaattcttgcactttttcaatatccttaattgtgattaatccggctaagcgaccgtcatcaccaactaaaggtaacttttcaattctgttttgttggaggatttgttcagcttcttctaaagaagtgccgacaggtgcggttacaagtgcttcgtgcgtcatcacggttccgatttcagcagagaaatcagagataaaacgtaaatcacggttcgtaataatgccgactaattttagatcatcgagatttgaaacgattgggacaccactaatacgatatttacgcatcaaatcttcagcagcactaacgggtttatccgctgttaaataaaatggatcaataataacgccattttctgaacgtttaaccttcaagacttcatctgcttgacgttcaatactcatattcttatgaatcacgcctaaaccaccttgacgcgccatagcgattgccatgggtgcttccgtaacggtatccatgctagcactcataattggtgtgtttaacttgatattctttgcaagttgcacccctaaatcgacttcgttggggagtacatgactctccgcaggtattaataaaacatcatcgaacgtaaaccctttttttgtaaactttgattcccatgcagacataatcttcctccaatttgtgaactaaattaaccgccgacccatcgattgttcgtattatctttaatcgataaccagtttaaaatttgataaaatattagcagatttttctgcaaacgtcaataaactcttattgaaaattcattttcatcaatatcgtgtacgaatgaatcacgaacatttaaaataagggtgcacaccacccagcttcgttatacaatagaaataactgattataaaggatggattggcatgcaagaacaacaacgggttctagatttaacacgaagttataacctacgcgaattaggcggttaccaaacggttgatggcaagtccgttaaatggcacaaattattacgttcaggtagtttgaacgcgctaaccgcaactgatattgaggatctcttaaattacggtgttgcttacgatgtcgatttccgttcacgtcatgaaatcaaggtcgcccccgacccatttgatgacaaccaactaacctaccatcgtctttcggtatttccattcactgaccaagccgatacccctaaaaagccagccaaaaaaggcctaatgcggctttttggtaaaaaagaagctgctactcccgaacgatcaagtatggaccggatgtaccaacaattggtcaccgactcccatgctcaagcagcttatcgcgatttatttaccgtactattaaataatcacgatacaaacggtgcagtcctttaccattgctcagccggtaaagatcgcaccggtgtcgcaacttttttaattctaagtgctctcggcgtcgactggaaaacaatcgttgccgactatgtcctctcaaatgaggtcctaggactcagctcagcaaccccaacccgaatttcaagtaacgatagccaggtcgcttcaatgaacgctaagagcattacacaggctaatctagaacttgtccgcgacacggttaatcaagaatacggcaacatcgaaaactacctatcaaaggcaatggccctcaaaccagaagaaatcaaacaattaaaagaggactacttagaatagcgtgcgactgcaaatggttgtccgctgaggattagcctaaaaaggcgaacacaagcaattgtgttcgcctttttgaatgatcttttaatgactcttaatataatttttgccatccgctgctggtgcgacggccttgcccaagaaaatcaccagaataataatcgtaatcgcgtatggtgcaatctggaaccagacactattcacaccggccagtattgggatgtagccgccgataatcggcaaactttgtgcgagtccgaagaaaatcgatgcacctgtcgcgccaattggatgccacttaccaaaaatcatcgccgccaatgccatgaagccctgacctgaaatcgtcgctgcgctgaagtttaacgtaatcgactgcgccatcaccgcgccaccaatgccgcctaacaaaccagacaacatgaccccgatataccggtaacgactcacattgatgcccagtgtatcggctgccgctggattttcaccgactgaccgcaagcgcagcccaaatcgcgttttatacagcacataccaactgataatgccgaccaaaaccgcagcgtaagccactaacgacgtcttcgtaaataaaatggggccaatcactggaatttgggccaagccggggaatgtgaagttaccgatgctttgattaatcaccggcgtttgccccttaccgctatacagcacacgggttaagaagacacacaatgcaggcgccaataggtttaacaccgtcccactaataatgtgattagcgcgcaatgttacggtcgctaaagcatgtaataaggagaacagtgcaccaaacagtccaccaaccaataaggcaatccacggcgtcaatccgccaaaaaccgtactaaattgaagggtaaagacggcactgctgaaagccccaacaatcataatcccttctaaaccaacattaatcacaccgctatgctctgaaaaagcaccacccaaggctgtaaaaatcaatggcgccgcgtaaactaacgtggtcgcacaaatcgtcattaaaatcattgtgattgtcattatttttcaagcctctctttcatcaacgcgtgttttttcagtaagcggtgattgagtaattgttcaaataagaagcgcacacccacgaagaagataatcgatgcaatcacgatattgacgatttctgtcggagttgttgagtagacggaaatgcttaagccaccaatctgtaaagcagagaataaaatcgccgcaaagataatcccgattggatgcccattcgctaataacgcgaccgccattccattaaagccgatatctggtaaggcatttgaaacggaaatattttgataattccctagaccatcgacagcccccgctaacccagctagtagtccagataatagcattgcccacataatcgtttgtttcgtattcatccccgcgtaacgtgcagcttgttcgttcaatccaactgccttaatttcaaatccagtcttcgaccgtttcaaataccaccacatcacaatcaccaagactaacgcgatgaaaaagccccagtgaaacgttgagtgattggtaatctgttccaaaaaaggggtccgcaagcttgctttagggacaatgttggccgatgagtcgctgtcttttggcgccaaccaacgtttaatcgcaaaattgacgaaatacaatgcgatgtagttcaacatgatggttgtgatcacttcactggtcccaaagtatgcccgtaaaaaaccggccaaccaagaccaaaagccaccgagcagcatccccgctaaaatcgcgccaagaatcaagagaatccccggtaaatttttaaagtggagtgcaaagacaatcgcgccaaaccagcccactaatagctgacccgacccaccaatattgaaaaagccggctttgctcgcaattgaaaagccaagggctgtcaaaattaacggagtcgcattgcgtaatgtctcgccaatcgaatagatatctccgaatgcgccattaaagaggttactgtaattttgaataggcgaatatccaaaaaccaacatcacaactccgcccactaacagtcccgccacaacggataggattgcaatgattaatcctgaagattgttgtttattcattcgtctcgccctcctactggttgttgcccggccattaataatccgagcgtctgactcgttgtggtttgtggatcaacttcaccaacaatttgaccggcgtgcattacaagtactcggtcagctaactttaaaatttcatctaattcaaaactaacaagtaaaatcccacagccttggttccgttgttcaatcaagctctgatgaatatattcaatcgcacctacatcaacaccgcgggtcggattggcagcaatcaagacttttggttgtttggcgatttcgcgcgcaaccaccactttttgctgattgccacctgaaagttctccggcaagcgtttgttcagattgcgtccgaatgtcgaatcgtttaatcagtttctgcgccgtttgattgatcacccgataattaagccagcctagatgactatacggttgatggtaataatccttcagcgctaaattttcagcaatcgacagtggcaaaatcaaaccgatattctggcgatcttctggaatgcaccctaagccttgttcactaatttggcgtggtgtccgtttcaataatgactgacctcctaattcaatttttccagactgcggttttaattgtccggttaaaacctgaattaactcactctgcccgttgccatcaatcccagcaattccaacaatttctcccgcatgcacggtcaatcccagatcatctagaacagtgcgtttagcaacacgagcagcgacatgttccaccgatagcatcacagcgccttgattagccattttcggtgtgggggcttgttgcggacggccaaccatcatttccgctaattttgtcggatccgtttgtgcgactagtaccgtatcaatcacacgtccggcacgaatcacgacgcaccgatcagcaacttgtttaatttcctttagtttatgcgtgataaaaatcaacgacttcccttccgcctttaacttctcaaaaatggcaagcaaggcttgaatttcattcggtgtcaaagctgcagtcggttcatcaaaaatcaatgtcgttgcttctcggtaaagcgccttgataatctcaacccgctgttgcatcccgaccgaaatatcagcgatttttcgatcaaggtcgagcgccagttggtatttatcgactaaagccgtgaccttttgccgcgccgttgcatagtcaatccgtccctgtttagttggttcgtcacccaggataatgttttctaagaccgtaaaagccggaattaacatgaaatgttggtgtaccatcccaatcccgagggcttttgcatgtcgagggccatttaaggtcactgcttgtccgttcaccagtaattgccccgcagtcggctttaattgtccggtcaaaacacccatcagggttgatttccccgcaccattttcaccaagcaaggcaaggatttcaccctgttgcaaggttaatgaaatatcatcattggcggtaaaggcgccgaaccgttttgtaatgtgctgcatttctatcacagtttttgccatttttacgctccattcattaagcatacaaaaaggatggctgataactgctgccatcctttagcattcaatagtcgttattctgcagcaactttaatggtgcctgcttcaattttttgttgatattctttgactgcttgccatgtttcaggggaagcattgtcgttcactaaggcaacgcctttgtctttcaaatcatatgtgacggttttgccaccagggaatttatcattcttagcttggttagcaagatcttccactgctgtgccaacttgtttaacggcagatgctaatgtgacgttgccaccatcatatttcccatcggctttttgatcttgatcaacaccaatcacccagactttttgaccacccttagaaatgttcttagcagcggtaaagacgccagcgccagtgccaccagcagcgtgataaataacatccgcgccgttgttgtacatcgcggttgccaatgattggccgacatcggctttcgtaaatgaaccagcatatttcacatcaacggtgattgctgggttaacggctttcaccccttgtttaaaaccagcttcgaatgttttcacgacggcactatcaattccaccgacaaagccgactttattcgtcttagtagttttcgcagcggcaaccccggctaggaatgatgattgttctgttttaaaattgacggacgcgacgtttttccgattcttaacgtttgaatcgatgattgcaaagttaacatttggattattctttgcagattggctgaccgcgttatctaacttatagccaatcgcaaaaatcgtttggtattttgccttgattaacttattaatgttcgggaaaaagtccgcatcagaactcgattgtgcgtaattgtaaccattgaccccttttttaagatcatgactagcaccccatttttccaaaccttcccaggcagattggttaaaagatttatcatcaatcccaccaccatcagtgactaaagcggctgtgtgcgttgctttctttgatgctgtcttttgactcccgcacccggctaacacgccacctaatacaaggactgtcgagaaaagtacgaccaaactttttttcatgaaataagcctccgtcaataaatttgataatttattataaacacgttatcgacataaaatcaatacattgatttcattttataaaatattgttcgtttatattgtatttgttgctaagaaatatagataatgctaatattaattgataactaacgaacaatcaggaggcgaaccatgcaaacacaagtctattttaatcacgatggcggtgttgatgatttgatttcattaactctgctcctacaaatgccgacaatcaaactacttggcgtcggcgtaattggcgctgattcatatgtcgaaccagccgttagcgcgagtcgtaaaatcattgatacgttttcagatcaatcagcgcggttagctgtggccgcttctgactcacgcgcagtccatccttttccaaaagaatggcgaactgacgcttactcagtcgatgcacttcccgtgctcaatgaacgtggcaccgttcaaacgcctctgagtcctgaagccgcacatctcgatctaatcactaaactcaatcaagcaaccgaacccgtcacattgctctttaccggcccattaactgatttggcacgcgcactcgccatcaatccaagcatcgaatataaaatcgctaaacttctttggatgggcggttcttttcttgaacaaggcaacgttgctgaacccgattctgatggtactgctgaatggaatgccttctgggatcccgaagcagtgaaaactgtcttcgatacacaaatccctattgaattagtcgggctcgaaagtacgaataatgttcccttaacgccggcgattcgccaacgttgggctagtaaacgtgccaatgccatgatggactttatcggcacctgttacgcctttgttcctcaactggtccatttcaaaactaattcaacttattatttatgggacgttttaacaacttgttaccttcttgatccaacaatcgttaaaacaaaagccattgtatgtgatgtcattccaaacggaattgccggcgggcgcacgttcttaactaaaaacggacgtccggctaaactcgtctacgacgttgatgcagctggattttttgatctaattgaaaccatcataaaagcagactaacgcaaaaaggagcaccgacttatcagtcagtgctccttttttgaacgtgctttcatcaacagcttcctgtgctttgctacacttagcaaagcggtgcttgcagcgccaattcgctaagttaggcaaatgctcagaagctacccgttgatgacgcactccttttttgaacgtgcttgctaaactaggggaacaactttgtaaaggggctgtttgaatgacgactgatttcaatcaagaacaagcgcatctatccactgtttatcaacaattaaccaccactttgacggccatcaatgatgcccaatcgcaaaaccagaaaaacggcaacaccatcaaagcgcagatcaccggtgaagccaaactcaatttcgattcatacgctgataatcttgatacattcgctgctttagaaagtatcaacaaggaaatcgatatgctcaacctgaaaaccgattcgctcgttgcacgtcatgatgagaccttacggctgttagagcaaccctactttgcaaaaatcacgctgacttttcctgaggaaatagacgccgaagatttttaccttggttcagctagcttcacaaaccaagccggcgatcctgtgatttacgattggcgttcacctatcgccgatgtttattaccagcaaacattcggccccaccagttatcaagctaacggtcgcgccattgcggtcaatctcgaccgacggcgccagttccaaattcaagctgatcagctaatcgatttctttgatacgcagattgccatcgaagatcccttgttattagccactttaaaagaagccaaaacaacgcaaatgagcgccattaccgcgacgattcaaaaggaacaaaacgcgattattcggcaacaaacgactgaccatttactcatcgatgggattgcgggcagtggtaaaacatcggtcatttttcaacgcatcgcctatttcaagactatatcgcccaagttttaccagacttaggtgaacaaacaccagtcaacttaaccctacaacaactattggcgcaattgttaccttctgatctagccgcactccccatcgctgatcaaccagctactttgaccatcacacaattaacgttgcaggcgagcgatttccaatctttaagccctggtttaccgctgacgattgatgccgcaacaagctaccaattcttcttaaaaacaccggtggataccccgcttgataaacgaatacaagcaactcagcaacaactcacaagttgtctacaggaaagcatcacaaatgaagcccaatcagcagatgctttaactcaacttgaaagcctcactgaaaccgagcaacagcgcttattcgaccgcttaattcgcgaagatgaaccactagcaccgctagcacgcaaaatgattcgtcatgattaccaagacttagctgatcagctaagcggttatcaatggcttgcttttgatcaaataattgcccgtcaaacaccgattgatgctgttattgcagctcagatttatgcttatttaacgcatcacgtcttcccaaacgttaagcaggtctttatcgatgaagtgcaggactatcacgcaagcacgttatctctttttaaacaacttttccccaaagcacagttcacggttttcggtgatcagcatcaaagtatcaccccgcataaagtacaattcgaacaattacccaccatttttccacaactacaaactgcggcactgcgcacaagttaccgctcatccggtgcaataacgacgttatttagtcaactattcaccgatttaacagatgtccatgccgttcaaccagcaggcaagcggccaacgacgatttgtgcgactgattttaacgactacctcacccaaatccaagctcagattgaccaactaccaactgaccaaaccttagccatcatcacgcctgctggtgactttgacgagcggttaactggcctcaaaaatgtccaccacttatccacagaaacgacgaatctccccgaaaccggcgccttcactttaccgctgacgctggctaaagagttagaatttgataacgttttgttgtacgatctgactaacaattattataccgagccaactgtcggccacaaccgcctctataccgccatttcgcgggcaacgcatcaattgacgctcagcgcactgggcaagttgccggttgaattaaatggccaataaattggtcatttgactgactaggctagtcctcaaaatataaacgctcgctgtcgcactctattcaaatacaaactgattgttgtacagttcggcgtagaagcctttttcgtctagtaattcttggtgactgccttcttcgatgatgcgaccgtctttgaggacgataatgcgatccgcattgagaatcgtctttaaacgatgggcaatcacgaaactggttcggccttggatgacgttgtccatcgctttttggatatgactttcagtcaccgtatcgacgttacttgtcgcttcatccaaaattaagagcgctggaccggtgataatcgtccgggcgatactgatcaattgtttctgaccggtactgaagatgttatcttcttcactgacagccgtttgataaccatcatctaacgtcatgatgaagtcatgaatgtgggcttgctgggcagctgccaccacttcttcatctgttgcatcgggtttcccgaagacaatgttgtcgcgaatcgttcctgagaaaagcacggattcttgcaacacgatgccgacgtgcgagcgtaatgcatccaaatccatttcacggatatcaatgtcatcaatcttgactgcgccttgatcaacatcatagaaccgattcatcaagttcatgacggttgtcttcccagaaccagttggaccaaccaacgcaatcatttggcccttatccacttcgatattcacatcatgcaaaatttgcttacctggtaaatagctaaagtcgacatgttccatggtcacggagcgttcaatgccctcaaattgcacaccgtcggttggacgcacttcatcgtcttcatcaaacacttcattcactcggcgggcaccggtaattgccaattgaatcatgctgtaactcgatgaaagttgtgcgatctggttatagaattgttgtgaatattgaacgaatgttacaactaagcccaaagcgatcgactttttaatgtcaccgttcaccgctaaccagctaccataggaaatcacaattgcggtattcaccaacgacatcccttgcatcaacggaaagatcatcccagaataaatctgaccttttaaagtcgccttgcggacattttcattatgttcaatgaagccatcaatcgtttcttcttgaaggctgttagtaataatcactttttggcccgtgattttttcgttaatgtagccattgagtttcccgacttcatcttgttgcacattaacgtatttttgcgctttattaatgatgatccaagcaaggatgaatgaaattgggacggaagcaattgtcacccaagcgagctgcacatcttttctaaacatcataatcaataaaccaattaagagcgccgtgcctgatacaagttggctcaacacttgattcatcgcattgtaaatattatctaagtcactcgtaaagcggctgagaatatcgccatctgaatgacggtcgaaatatttaatctgcattttttggagcttattgaataacccaatccgcatccggttggttgataacgcgttgacgcgtgagaaaaccgcgcctgataccaacgtcgctgctgaactaaagacgtagaataaaatcaacgatacaatcacctctacgaaggcgtctttagatgccccactggttggcaaatgttgggcttttaaaatttgaaatttcgttgcatatttgactaactcattgagcgcgtccccgatatattcgggtgctttcacctgaagataagtcgccatcacagtcatcacgaggatgattgcaaaagaaggtttataccgctttagataatggaaaaagaacttcattgctcggttaaattctcgcattggttatcctcgctttcctttttgcgtttcaaagatttctcggtagacatcactggtttcaagtaattcatgatggttaccaacaccgactaaacgaccttcatctaacactaaaatccgatccgcgttgaccacagatgaaatcttttgcgcgataattagtgttgttgtgccagctaattcacggtctaacgcctctttaactaatttttcagaccgggcatctaaggcactagtactatcatccaaaatcagaatcttcggttgcccgattaccccccgtgaaattgagagccgttgtttttgaccaccagagaagttcgcactgcgttcttcgacggttgcatcatattgatcagcaagcttttcgatgaactctttggcttgggcaatccccgttgcgcggtccatatcggcgtcatccgcatcttttttcccgtgcttcaagttttgtgcgattgtgccggagaataaaatcgctttttggaggacaaatgaaacggcgctgtgtaaattatgttcgtttaaatctttgattggcacgccgccaattttaatctgcccttcagtcggatcgaacaagcgcggaatcaattgcgccatcgttgacttaccggccccagttgcgccgacaatcccaatcatttcaccagcgttaattttgaaattaatatctgttaacgtgttacgatcgtcttctggataacggaagctgacgtgatcgaattccaacgtccccgctaagtcttgatcagggacatctggataaacgatatcaggctctgttgaaagaatttcttggagtcgcttcaacgaaactgccccacgagatgccatcatcatcatcatgccgcccatgatgatcgacatcatgatttgcattaagtaattcataaatgaggcaatcgccacaatcgcttctggatccgtatcgactaagttcccaacgaaatagattgatgcgacaaccgctaagttcgccaccaacatgaacgctggaatcattacagaaaaaagcatcccgacgattgtcgtatggtgttctaattgattgcttgtttttgagaagcgactgatttcgttatcttcttggacaaaagacttcacaatccgcgtgcccattaaattttctttagcgaggttattaatcttatcgattaaattttggatggcaccgaagtgtttccccatcgaacccattgataagaatgtaatgatgaagaccgcgatcactaagagcacgataatccaccataaactcggaatcgaattcatcgcaaggatgaaactgccgacaaataaaatcgggattctaaaaatcgtttggagcgtcatcataatgacgttttgaacctgggtcatatcattggtcaaacgcacggataaattcccaactgagaatttttcaatattggcaaatgagaaagtctgtatcttccggaaagtagtttcccgcatatcggcagtcattccctgcgccgtcatcgccgacgtaatggtgttgaccacgcccgcaattaaaccaaccacggcaattacaatcaaataaattccaatttgacgtaccttatcttgatcgcctttcataatcccttccaaaacatcttgtaatagttttggttgccatagtgaagacgcaacagaaataaccgtcgctaaaatggaaagactaaacacgccccaataaggctttaagtgctgtttaagtatcgacatgagcatccctctttttctgtagttgaatctcctgtacaaatcctgtacagtataatcgaacagtgttcgagttactactttatcaaattttaaaacgaattacaatcatcttttcataaaaagtgaaggagcttcattaatatggtaaaacagtcaatctctgccgagcaaatcatcactgccgcgtttgaaattttacaagtatccgggaccgtcgatgccctttcaattcgtaaaattgccaatcaattagacatcggggcggccacattttactggcatttcgaaaacaaacaagccctcctacaggcgatggctgataacattattcaacaaattgagattgagccatgtaacacaaccttagaatggacagaccaaattcgccaaatttttagcgccatttacaccacttacatagcacagccctatgccgctgagttgatgatgcggaccgtccctgcaactaaggcccgcctaggtcttatcaaccacttaattcaaatccttttggatgccggtttcacgccagaacaagcaagcctagcgattgaatccatcgatcacttcatgtccggtctcttcactgacatcaccggtgagcttgagatgaaacatcgcgtctcacaacataaagacacttatcttgcacagttaccgcttaaaatgcagcagattgcgactgacaatcattacaatgctttcttaaaaacttttgaacatcatcggcaccaacaacaacgctcactggaaaaattcatgctaggcctcgatattttcctcgctggtttgcaacaacaacttgcttaaataaaaagcgcgcagacaactgattgtctgcgcgctttttacatttaaactgcttttgaacgaatcccgaatccataactcagagccatcacgccgacaatcatgatcatgtataacggtaatcgagtgttcgatcccgtatgcaatagactcatgccgtacgttaaggcgctgattgcgaggtagtagccaaaactaaacaacccgctggccgtgccgatcacatcttcgtaacccactaacgctaaattcaagaccaccggtaaggtcgtattcaatccccacaagaaaagaggccgtgggacgacctcttcttttgtgggtttctagctttaacgcgctttttgaaactgacttctgtgcttagctccaatccgtaaacaatcgactacgtcgctcatttacagatttaggctagtgctcgaagtcaaaacgtttcaaacgcgcttctatttctttaacgtgcttttaattcgcaaccttctgcgccttgctacatcaaccagacaatcgcccttggcgcttatccttctgattaggcaagtgctcaaaggctaaccgcgaattaacgcactcatttttttaccagcttgcttttttgacgcctgggatttggcctttatgggctaattcgcgaaagttgatgcggctcataccaaattgccgcatgaaacttcttggtcgaccatcgattacatcgcggttccgcaatcgcactgggctagaatccttgggtaattgagaaagagctaagtaatcgccctttgcttttaattctgcgcgcaagtcagcgtatttcgctactaatgcgcgttgttttgctaattttgccacttttgatttttttgccattgataaaactcctttttaccgtgctttcaaaagcatcctgttccggttagctacattagccaaacaatcggttacgccgctaatttggctaattaggctaatcctcacaggataaccacttttgacgcactcattttctttaacgtgcttttaattcgcagacttctgcgcttagcaccgtgaatcaaatcatcgacttcgtcgctaattcgcttccccgtactaatactcaaaagttgattaagcttgaacgcacttttccccgattgaaatagcctacgctaactatttatgaaatgcaattaaaaagacttataaaaagtaaccatttttcaacactggcctgtgctatacttaatctaagttgatttcacagaaaggggcactttcagatggcccaaaaaaacattctccaatacttaattctcgggctgttaaatcagtctcccaaaaccggttatgatttaaaacgcgtctttgaagatgatatcggtgagttctggcaagcccaacacagccaaatctatcctgaactcaagcgactcgaacaggctgatcggatcacccacgtcgaattgatcgccggaacaaaattaaaaaagaagcagtattcaatcactgcagatgggattgccttttttgacgagtggcgatactccccaaccagcgaaattattgccagcaaagacgaatttattttgaagctatactttatcgactcaaaaaatgatgctcatttagacgcaatgttcaccgaacaaaaaaacttacaccaagccaaactagatcacctactcgaccggcgtcaaacccttttcagccaacaagctgcggtggatgcgcactatggtcattatcttattttagaacacgcgattaaccgcgaacaagactatcttaattggttaacaaccgcacggccgtaaaatcgacccttaacaaatttgagataagtgctatcctattagtaagaagtaaatcaagttaggctgtttcttcatttgtatacgttataataacgcgcttgtacaggtggtcagttgaccaattgtatgggcgctttttttatttgatccagcaacctagactttaacaaattcaggaggaatattattttaaagcgcaagaatgttgataaagtcgtcttcatccccacgatgttactgttcgggattgtctccgcatttttaatgttggggggtgacacgcttcagcagtcgatttcacaactacttgatgtgatgacggcacattctaaatggctttacattggtatttatatcattaattttattttcctattttggttggggtgtagtcactatggccatatccgccttggccaaccaaatgaaaagccagaatataacgacttccaatgggggagtatggtttttgcaactgggattgacgctagcatcttaatgcttagtaccactgatccactgcaatacttacagaacccaccatttggcgctaaacctttctcggctgaagcataccgctacgccaacgtctgtgggcaatttcactggggacccatggcatggatgatttttgccaccgcgactgtcgcaattggctacgctctctatgttaagaacttacgggtacaacgtttaagcgccgcaatcgacctattagaaggaccacaaccttacaaaaaaataattcgcaaattaatcgactttaccgttgttttcggcattatggggggcatcggctcatcaatcggaatggaaattcccgtgatttcaaaagtcttgagcacaatgaccggtttgaatgataccatctggcttaaacttgccctcttcattatcttactggtgctattcaccctcacggtatatgccggcttagataaaggcattaagaagctcagtgcttggcatatctatactgccattggctttttattactcgtcttactaatcggtccgacattcaagctaattggcgctgaaggccgcgatgtcttccatctctttggtaacttcgggcgtttaagtttaaatcagactggtgcacacagtgcgttcgcacaacacgaaaccctcttttactggggatggtggttatcttacatgcctgtcatgggcttattcatcgctcggatttcacgcggccgaaccattcgccaagttttattgggaatggcgacatacggcgcatttagttgtatgagcttttacgctgtacttggcggttatgcgctcttcttacaacgttccggtcaaatcgatcttgttcatctattgaatacccaaggacaagccgctgtcatcgcggcggtcatcacgaccttaccgttcaaaattatcatgttagcaattttctgtctgtcatgtttcattttcctggcgacaacgatctcttcttcggccttcatcgtctcatcatttaccagtcttgaattgaaaatcggagaacaacctaatcgttggaatcggatggcttgggtgatcattttcattctattttcacttggaattgtacttgtcggtagtttccaaaccattcaagccgtttgcgtgattgctgggttcccattgatttttgtctgcgcattattgctcgtttcgatttttcacgccgttcatgatggcgagattcccattgaaattgaaaaagaagaaacttctcattttctgaaaaaaaagcttacgccgaaattttttatgtgatacggttatatctgttaacttttcagaaagaaggaatttaaaatgccaaccaataaaaaagaaggtattatttttacaacattaatgtgtttctgcatggtacttggaatgagtatctataacttagttttacatgatagtctatcatggggtgctttgtctaccggtttaattccaggtttcatcgtcgcatttattctagatgtattcgttgtcggtgcaattgctaaaaaaatcgcatttagcttaccattgaacaaagaaaataaattagtcatgattctcacaatttcatgtttaatgattctcggcatggtcacatgtatgtcacttttcggaattctcatcgaaggtggtatccctgaccacttaggtagtgtctatcgtcacacatggttgatgaatgtcatcgtcgcattaccattacaactgatcatcgtgggacctttctcacgcgccattcttggtaaaatccaagcaaacgcagccgcaactgaaacagctgaataaaaacaaaaaaaaacgacgactagcttacgtagctagtcgtcgttttaattatgctaatattttttgaatagccgctaattcttcggccgtaaacgttaagttatctagtgcatgcacactgtcttgtaattgactcaagcgcgaagcaccaactaacacactggctacagtcggctgttgtaaattccacgcaagtgccatttcagccaatgattgcccacgttgttgcgcaattttgttcaattcttgaaccgtactgattgtttgatcaaccttttcaggtgataggaagggactatctggacaagctgcccgcgaatcggctggaatcccgtttaaataacgattggtcaataatccctgtgccaacggactaaacgtaattgcaccgataccttcatccgccaagacatccgttagtccatcttcaatccatcgatcgagcatgttataacgtggttgatgaataataaagggtgtcccgagcgctctgaaaaccttcgtaatcgctttggtttgttctgccgaataattcgaaatcccaatatatagcgcctttccttgttgcaccaataaatctagggcccgagctgtttcttcaattggcgtatctggatctggtcggtgatgatagaaaatatcgacgtaatctaactgaagtcgttttagtgactgatcacagctagcgataatattcttcttagaaccccactcaccatagggaccgggccacatataatagccagccttcgatgaaatgatcatttcatcgcgatagcgacgcagattatcatgtaaaatgcgcccaaagttttcctcggcgctgcccgctggtggcccctaattattcgccaaatcgaaatgagtgatgcccatatcgaacgcgccaaaaatcgtttccttttgagtcgccatcttatcggtttcaccaaagttatgccataaccctaatgaaatcgctggtaatttcaacccagaatgcccgacgcggttatattgcatcccttgataacgggtttctaatgcgtgatacatgtacaacgccttctctactcaagtattttgactatttagccgatcgtcttaattgcgtcttccactaatccccagaacttctgatgatcgagttttacagcgactgatgtgtgacagtctgttggaattgggaatctaaaatcggcgaccgtcatcccacgcgtcaatgttccattgagttcgatatcaacgggcactttcttagtggtcatcacacttggatcaatcacgtaagccacggcacatggatcatgaacgggcggtacatcgaaattttgccccttcttgtacatatcgcggaaaaaggctaacaaatcaaccacgaactgagacgtttcagtatgaatgccttcaatttgttcaacaatatctggtgtcgctaacgcttgatgcgtcaaatccaaaccaaccattgtgacatcccagccggcattgaatacaatcttggccgcttctggatcaaatttaatgttaaattcggccactgcactcgcattcgcttcgtgataaccgccacccattagaacgacttctttaacgcgttcaacaatcttaggttctttgcgtaccgccattgcgatgttggtcaacgcacctgttggcactaatgtaattgtattagctggatgcgtcataattaaatcaatgattaaatcaactgcatgacttttttcaagcgccaccgttggttctggaagaacaaccccgtcaaggccagtctccccatggatatcagctgctactttaatttcttcaattaatggtcgcgaacacccagcagcaatcggtacatcgtgcatgccgatcatggtcgcaactgcgagggcattgcgcgtcactttcgttaacgtctgattggcagccaccgttgtcactgccaacaaatcgatttctggattgccgtatgctaacatcattgcaacagcatcatcatggcctggatcacaatcaagaattattttctttgccattcgtaaaacctccactctctttcacttcgtgcatactatcactatagaatttaagcggtttcaagtcaaccatatataataaaattcaatcatgaaacggagtctattatgcgcattgatactggcgaataccctaccggcgaaaacgccgtccaccctaagaaagttaaacgtttaaaattacttagcaaggttgcaacaatcacctgtattacgatgtatgtttcatacatcccccaaattatcgctaatttttcagggtcacctgtctcacctttacagcccttagtcgcaacaattaatgggtgtctatggaccgcctatggctggaataaaacctataaagattggccggttattatttctaacatccctggcgttattttcggactcgttaccgtaataactgtttatattcactagaattgtttgttaaagccacgatttgcgtcaaataatttttgataactaacagaaaagcaatccatcataagttgcttctctgttatttttttatccctttacccaaacataaaaagccaaggtgattccttcttttatcgaaagaaaaccatcttggcttcactttgaagtaccgactatgggactagtcggccttaagcttgttattttgctgctcgtttaacgtatgtgccttcttgtgtgttgatttcaaggacttcgtcagcgctgatgaaatcagggacactaacgactaaaccagtttccatcgttgcaggtttacctgaaccagtcactgttgcgcctttaatcgaaggttgtgtttcaacgacccgtaagttaacagtagttggtaaagtaaccccgatcacttctgaaccgaagaattgaatcttgcagttcatgttttctaataagtattttaattcagcttcaatagcagctgtttgaatttcatattgttcgtaagtttcaagatccatgaagaatgccacgttatcttgtgtgtataagtattgaacatcttttgtatcaatcattgcttgttcaactttaacttctgggcgcattgttgtttcaacaattgagccagtccgtaagtcacgcaacttaacacgcataaccgtgtttcccttacccggtttatgatggttagcttctaaaactttgattaacttgccgtcttgttcaaacgtcattcctgctctgaggtttactgcttcaatcatgacttgatctcctttatttaaaaaaatattcatctctaactgtaccaaatgaaagccgtttaatccagccctcctgtggtagttatcctatttaatgtcgagtttatgaatcttatccgctggttgtggctcataatgttggtacatcttcgtaatggccaccttaggtaagcctgattcactaatataaatattaggtttgaggtatttcttattttgcacatcttttaagtgataatgttgaatcacttgtttctgatggccagtcggcgcttcatcttgaccatagaattgaatcttggctaatggtaagctaatcgttgcattattaatcttgaaataagcaacatctcgattgctgccaagatacgtcatcttttgttgcttatcagcttgatagaattgctcgatttgcttcatgctgtgattatcgaccagccggacaatcggttgatcacctttgaaaaggtgtaagccatctagcgactggcgcacgttttgagcactcaacatcaaccagacaatcaccaacatactgataaagtacacaatatgtaagctaagactgctagcagcatgattcaaactaaaagtgtagctatcctctagctctttattcatgatttggcgccgaatgcgcattgcaataatcttatacgataggtaccacactacaagcgcgactaaggttgccccaaaagctgtcaaaattgtattttttagaatttctgaatccgtcaataatggactaaagccgctcacaagtttaattgtgagcgcgccaaggattagaatcacaaccatttgtagtacaaaaaaacgggtccgaatacttttgctaatctttgtgggtgttaccactttcgtcttatctcccataccataaatcctcccttgttaacctacttaccattttagcataccgtttccatcaagttgattaaaagtccctcgttggcttattttttacaaaggcatctttcttcaaaggtagctgttcaatatgataaggtgaagttaatcaaacggaggtgtcgatatgttatatccagaaagtttaactcaattaatcgccgattcaaatcagccagtcatctcgttattcattaacttagagactggcggacaagccattaatgcgaacaagattaagctcaatagtttttctaagcaaatccgtgaacagttaaccaccgactatcctgaagaaaaaaccttactcaaccaacttgaggacttactaagtaccgctccccaagaattagcacatatacagtcagttgcgttttacatcacagctgctggtcactacagccaaccccttcattatccgatcacgactgaatattttctaattgctgatcaacccgagctgcgtccactcagttcggaattaagtctgagtctgaacgggaccattctctgtctcaacaagactacttttagtttgaaatccattcaacaaaatgtcattcgggattatcctttacctaaagacgccccaacaaccattgaaattgggattggcacagagcgtaaaggcgaagtcgtccaaggcttctcaagtccaacccacagttttgttgtaaaagaaaatgaacaacttatcgatcaaactaactatttccgcgtgattggccgctatcttgatgacttgctgcctgaaaaagcaccgatttacgtggtcacattacccggcaacttaaatctcttcaaggaactcgtcgttaatccaaactaccggatggatcaagccatccaaacttcccctgattctctttcagatgacgacttactcgacaagttactcacaaatgcgcgtcatgaactccgacaaaaagcgctcggattagcagaacgggccgctagtgcgtatcacggcgattcaaaccttggtgatcctgagattattctttcacgcattaacaatcgccaactaacagcactcattatcccaactgcacttgcaccatcagcaacaatcagcgccgatcaaatcatggatcttaatcacatgatgattgcggccatccaaaccggcctgccattctacccagtaccagttgaaaatattccgacaggactggtggcgatgggaatttaactcttaaaacacgtgccaatacagcaacgtatattcaagcgttgttgtactggtccgtgttttttgagttgcaaatacttgatctagataagctgccagttggtccgttggtaattcttcgtaataggcctccaaaaatggcctgtcgaaaacttcacttgtttgatattgaaaaatttgttgactaacttggtagcccgcatcttttaacacgttttccacagctgggatgatttccggtgtagtgttgggatcttgctgttcaatcccaaaataacgttcaagcggtgtgaacaagtcgtcctcgtttttagtgagccgtaagaatgcacaccactgacggctcttttcgctaatcgtcagtaatgcttgattggcttcgattgccggatttaacgccatccaaattaaatcatagcttttttgtggcgtttgcgccataaagtcagccacagactgctgttgataagcaatctgttggtctggtacatgctgtttagcttcttgttgtgcatactggagcatttgcgccgagatgtcgataatcgtataagcctgactgttttgcactagaggtggcaaataacggccgctaccaccacctaagtcagccactgtctcaacaggcagtaatcgccgatcctgtaaaaaagccacaacgtcagtgacaatcgacacctgtgactcttgttgaatctgatagtattccgctgcaaaatcatcccaaaaagctgcgacttcattatccacagtctatcctccgcttaaacttttattttctcagcttagcatataaaaaagatgccgacaaaataaattatcgacatctttttgaaacgtgctttttggttgcaccaacctccgcttaatctaaaatactcagttgctatccgcgaccgaacacacgcttttttaaacgtgctgcaatcgccatattcttccgttgttaggctaatcctcagaatatctccggcgattttcgcactctttatctcactaccagcactgggattggtgcgtattttgccatgtaggcggcttggctgccgaagtatttagcaacgcccttttgtgatttcgaaccgacaattaacaaatcgggtttaaccttaggaatcacatcttcgataatcgcttcgcctggttcgccttctgcaattactgttcgcacatgattcacaccgcgcacataggcttgatcttgatattctcgtaggtggttttcaagatcctcatattggccgtggataaaatccttgttcaatgcttgatagacgttcatttcgtcattttccaataccgatacaatgactaattctaaatcctcacgtttagcccgctcaattgcataatcaaacgctaataacgcatcctctgagtcatcgaccccgactaaaattcgtttaatttctaaaactgacatgtgaccaacctccaattaattttcagttgctaattgctgttcaaaccgcttattgcctttatacaattcaataatcatccaaaccaataatgccatcacaccagcaatcaacacatatgcaatgcgatcagcagtagccaattgtgcagcacttgcgtgatcaccatagaaagcttcgatttgtcctggcaaccccatcatattcaaataggtcaagccaatgaccgataaccaacctaagcttttaatcaaccaactattcttgaagcgatcccccatctcaacccggctgtcggtaaacatcaacagtggcagcattgaaaatggtaaggcaaacgctaagaaaacttgggaattattcatcaaggtattgagcgcctcatgctcttccaaggctggtttattgctggtcatcatgacgcagattaataccggaatcaccgataacaagcgggttaccaaacgccgcaaccacaatggcattctcaagtgaatgaacccttccatgatgacttggccagttaacgtcccggtaatcgttgaattttgcccagaagcgagcaatgcaacggcaaacaaagttgataagattccggtccgggcaacacttgcaagaattccgttactcattgttgaggtatctgacaaagcttcaaataacccgaagaatgatggatctttaaccgttcccattttaaaaactgcaacccccatgattaataacaacgcattaacgaaaaatgccatcgtgagttgaatgtttgaatcccaagtggcaaagcgcactgtttgtgcaacctgtgcttcgttcttgcgatcaatcttccgtgtttgcgaaatcgcagagtgtaaatatagattatgtggcataacagttgccccgataatccctaacgcaccagtcaatggggttagtccaccaacagctggcccggtggcaaaggtcttagcagttggtactagcccaacaatcacccctgcccaatcaggatctgagagtgctacttcataagcaaaaaccacaaaaatcacgacaattaatgcgacaacgattgcttcaatcttacgaaaaccaattttcgttaagagtaataatagcatgacatctaaaatcgtaatgaatactgcaatcagcagtggaatcttaaataataagtacaaagcaattgccgccccaataacttcggcaatatcggttgccataatcgctaattctgtcaaaatccacaagacaatgcccaacggtttactcgtccgtgcgcgaattgcctgtgctaagtccatctgagttacaatgcctagtttagccgccatatattgtaataacatcgcgattaaactagacaccaaaatcacggacattaacaggtattgaaaactctgaccaccagtaatcgatgttgaccaattccctggatccatataacccactgccaccaatgcacccggtcctgaatacgctagtaacatcttccaaaagcctttgccctctggtacttcgaccgtcccattaatttcttcaagtgatgggccgttcgcatattcaatcagcttgtgcttcttgcccttttcttgttgattcattatcctcactccttattttgatcttgataacagttttattgtacgccgttttaatgaaatgtaaataaaaagttaggcaatgctaatttattttattcaaatcgataacaaatttattaacgcaagctacaaaaaaagcgccgtcgaaattattctcgacggcgctttacatactgctttaatcatccatttctttttcaattagcgcgccagtttcagcgtctaatttaacttgcattttttgctgtttttgatgaccttctacttcccagactgttcggccatcatctttttccaatgaccatttgatcacgttcccggtgaagtattgttgcgctttttgaagagcttgttgaggcgtcaacaattggtcaaacgctaattgcttttggtgtcgctcgacgccattttgttcatcggcatcaagggcttctttcgacaatcgactggttgcgccagttcgagcatccacatgcatgtgaagctcttcattgtcgttcattcccgttaattcataaaacatttggttaccccattgcttcagctcaacctcggttaaatctgatgcaggatattgttttgcgtacaattcacgggctttttcaagcgtcactttcggagcttgaaccgtttgttgcggactagtcgattctttttgagcggggggtgctgaatgttttgtttggttggctgtacaacccgtcaataggccgagcgttactaaactaacaatgattgttgttttgcgcatcctgttctacctcgctttgttttgatacttaaggataccattcaacagggtaaattaaaaagcaatatcccttcctagagcaatgttgtccccactttgaccaataaaccaagcccatacacgatgatgatgatggcactcactaagttgacgcccatcaagaattttggtgaaacttttttccggaaaaggctaaagataatggcgataccaaagaaccaggtcgcggttgccgaaacaacccccacgatgaatggaatcgcctcgctactcgtcatgccaccccgcaatgcgcccagcattaatgtcccatcaatcaaggcttgcggattaccccaaaccgccacaaatgcagtcaaaataaccttctccagtggcattggttctaacgcgccaaacgtaacggtactgcgggcactttttaaaatggtgtatccaatccataaaatcaaaagtccaccgattcccataatggctaaccgaaccgcatcgttttgcacaatcagtgcgccaatcccataaaacgccacgagtgaaaagagcgcatcaaataaccagatgaacaaactgttgaaaactgcccgccgtgttgtattcgacatggcattattaaaaacgaaaatattttgcatcccgattggtgcgacaaacgcaaatcccatcaagattccttttaaaaagaacatctattaacctccttggcaagttacctttcagcgtaacatatctaggctaaactttcttgtctggatttaattgtaaaatcagcatcgtcatcaacaagaataatgctgataaaatcaacgtccgttctcctaagaatgagacacatagtccgaccatcactgcaccaatcgtaaaactgataatgatgcgtaaaatttgccagcccttatcggctgccttacgatcatgtttaaaaacagcgtcataaaaactttccgccatcgtccgtacatttccagtcatcatcaatgatgtaaatgggccaccatccaattcacgaaattcctgtaattgcgcagccgcaatgattgaaacaagtgaacttgcaacaatatccggtacatacggtgaaattcccgcaacaatcgttaagaccaagacttcaatccccaagataatccgttgtcgtttgttaatcgattcgtctttttcaaaccgatgttgtaaaatgcgcgttaagattgttcccaacataaaggcgagaatcggggtaatgtgccgtaataatacggaccatttcatctgccccaaatgggttcctaataaaattagattccccgtttgtaatccggcgaagacttccccgtgcaccaaataagtgtaagaatcaaagccccccgcagctgccagtagcccgccatataataatttgtcgctcattgtcattttgttccgcattaattcatcctactcctcaactaaactataagtattaactctatcggaaaaaccactcgccgtctacaagtagttatcatttaaaacgttatcaaaaaaaggcctcagcaaactgattttgctaaggcctttttggcttaattttctacgtcaccattgaaaccggctaattgacttgaataaattgataaacgcgtcgcataactaggatggtcattattttccttgaccacttctttaagcgtcgataattgatcggtaataatgccgtcaacgcttgtaaataacatgcgttgcatcacatcctcatcattcaccgtccaagcatatactgtctgccctttgccgtgtgcttgacccacaaaatctgagtcgagcgtcgtcacttccatcgtatagccattagccggcgtttgggggaatgtaatgttatacggcagaataaaactaacaaatagttggggtgctttttgtttaatttccgccacaatcggataacttaatgaatgaatccggttatgattcttcaaaagtcgtttttcgtatttatcgataaagtgttgcaccatctgtggactgtcttcattcgttgtcttaatttcaacgagtagtttttgatggtgcttttcggctgctgctagatattgatcaaaactagcaacctttgcagaatgaccattttcacggacagtcaatgccgttaattcagcaagtgtcatgtcatggacgccgcgatcgacacccgccaagtgttttaaattatcgtcatgcatcacgacaaattgttgatccttggtttcatgcacatccatttcaacataatctggctcttcctgcgccgttttttcaagtgctggaatcgtattttgcacaccattaccatcatctaccccgcgatgcgaaatcaaggccggttgatcgtccaacattccctctaaatagacataattgtacaatgctaccccaccagccacgataacaattaaaccgattgtgccaatttggcggagaatcgtcaaattagtccgttttttcaccttagattggcgcacagccgtcgccattgcgggaacttcaccatattggttcaatacaatctgtaagactagtaccaccgttaatgcgagtaaaatctgactgacgatttctgaaataaacagattcaaaatggctaaaaataaagcctgatgtggcaagtgttggtcgtaataccgttgactagcaaacaagattaagcggaagcccactccaacaattgctaccgacgttgttaatacaaagccttttagaaaaatacgccaagcctgatattgggtagcttgccaacagcgtttgagcgtggttcttagctgcgcctttggatgtgcaatcgtttctggtaaaaacgtgattaagcgaattgaaaggactaatgcactcgcgtagaccaagataatggggacccaaattttgggtgatgaccacatatcctgaataataaaatctggaacggtcaccttggataacaacgctgatttaaagaggacctgtccaaagggtaagattaataagaaatacagtaaaccaaccaacatcgtggttggccgtaaagcgactaatccccggactgtttccttaaaaatcatccagtatgtttcttgtgtttgcttttgaatatggcgcatactgcgcaacaagaacgtcatttgcagataaactgccgcgcaaatcaagaccagaatgattagtaagctaatcattaaaagcggatgacgcatcatcaccggcaccagattggtgtaggttaaatacgtcacgccattgagtgccaccaaccgttctacaagccacgtaaacagcggtgccaccaagctgccaataattaaattcgtaatgacgagcagtaataaataaacactccaatgttgtctaaagagccgataattagcccttaaaaatgatgttaaacggcgcatataagttcctcccgaattgttacgttaaaattggtaataatgaaatcatcagataaatcatgctactaatgagaacaatcgcgacacttgtccaaaaattacggtgcttttgaaaatgatataaggccaataaactgccccaatcgagcagttcttgacttggaaccgcaagccacgataacgtgccaaatattaaaaaactgacaacgactgccgttaacaagcgcaagaaccaaccggatacccgtagactttgtaagattgtattcacaagctgaccagtcgtaataatcaccatcatgtacaaactaatgaataatatctgacaacaaaagaaccatgctaatgtcggccagacctggttctgataaatcaaggctgcgtaatcatttattagaccgacttcaagtgatttaagcagtacctgatacattaaaagggctccaacgattggaatgccacaaaggagtacaattgcaccgatagccccacgaatattgcgccaactaggaagcccaaatgaaccttcttgtgccagccataaaccatcaaaacgcgtcaaccaccatcctagcgcaatgactaacaccaagtaataagcaaagcttagaagacgtaaccaccacggttgtgcggctaactgcgcaaagtctaggttaaataattgcaacagtggttgattcgtattcaaaagcgttaacacaaagatcaaactcgcaaggattaatccccatgtgcgcttactgagcttttgcatcatcattttgctttgcctcctttaccagagtatcaatatcaaacgatacaacccgaccaatccgcgttttagcatttaatgcataggctttggcaccagattcaaaaaccgcatataaccgattgccatccaacgtaatctactctaaatgagctggcatccgaatcttaagtagcgccttttctggcgtaaattgttggggccgcccagtcgttgcaaaaacgtaaatccatgaatcgtctaacccgtaggactgcgaaaaaaaagcccgcgtatcactaaaagttagcccttgaatcttatccactgcttgccaacgttgttcacttttaagttcattactgcggatattccgcgccgtcaatttaacaccagctttttcgcgtcctttaatgaccgctgaaacctgaaacgactggacgttactatccccgaaaatattgaaatagccgacccataatgccccatcgtgatagctaacaagtgaagcccgggtgatcgacttcaacaacgttgaatattggtattgaatcggcttttgcggctgatctgcagggtactggcgaatagttgttaacttaattgcaaatagctgtgcacgtgccttcttacggccacaaacccataagagatcatgttcaggatcataagtaattccaccaacgtgtggtcggccctttaaaataatattcttcaaatgtcggccagtccgcttatccataatggacagaattgagttgccttgccgttgatggtcataagccgaaacgatcacatagtccggcgtaactgctcccccttgaggtgtcatcatttctgctgtatatgctttgtaacctgccggcgtttttttcaacatctgcgcctggtctaaatctggcaccaagtaagttccagattgggttgcctttgcatactgtccaaaagaagccggcgttaacccttgatagtaacccaaatcccgttttagatgagggagtgtaaatcgcgcataaattacctgtctagattgcgtgattgcctgttcagtaaccgtcttagcaggaccgaaaataagccacaaagcagctgataacaaaagcaagcagccagttaataaaaaggttgttcgtttttccaaatgcatcatcttactccttatccgcaacaaaattagatacttgttgattccctcagtataccaaactctgaatttaatgtacccctttaacgaatgaacgaacaaaactattagatgcacacaaaaaaagcataaccaactaagtggttatgccttttttgtgatggctaatactttaactttccatttatctctagaatttcatcaatatggtttgcgtaccaatcttcatatgcctgaccgacaagtgctaatacctctctccctttgtcggtaaccgccaatgatacccgtcgctgatcatctggtgtcccaaattctttggttatcaaacctttccgataaagagtgttgatcttgcgtgacgttttaggagcgccaccaccaatttccttagcgagttgtcctggcgtaatcgcttgcttttcttcgattaactttaagattaaatggctgtcaaaactaacaccatattcttcaccaatttgattgagtttaaattgaatcgttttgattgcattgacccaatcaacaaatctgttaaatctttctttgctttatcttcagtcattttatattctcctactaaactctgttgccatcatttgtaaaaccaacatttactaataataaattagcttataattaagcaatattataattattattatctagttcatcgcgctattatcttttgtgcaagtcattatagtcttaatttcataaaaagtaaatattttttaaaaacttctacgacaatcaagattttcggcagtgattcatttacaatttaccaaaatccacatcaataaatacctttttatgactagagttactcagatgaccttctagatttgatttatattttgtttataaaattgattttatttcataaaaaaaggcccgcatctaggatgcgggccttcaatcattaatgtctagttatggatataagtaaatgccccggcatttgaaattgtttgggtgttaggaccagcagggttgctgaagcccatcccaccttgagtgatggtaattgtcccagctgcggcatcgtatgattgaacgtaagcaacgtgaccatatgtcccatctgcggcccaagaacctaccatttggccaccagcaaagctaacgattgcgcctgctgctggtatatggttaactgtgaagccagctgctgcggctgaagcaccccattgagcgccattcccccagttattgccagcccaaggtgctactgacttaacataccatgtacattgaccccatgcatatgaattcccagctgaattaccagcaacttttccactgccaccgaaaacagatgtgccacccttattatctgatggcgtgtcaattgatgtaggttgaggtgtgtcttttttagcattgttggcattgttggcattgttggcatcgtctgcagcctttttagcagcagcgtctgcttcttcagtacttgctttgtcgaagtctgcttgtaaagctgttaattcgtctttgttatcattgattttttgtgataaagctgtttgtttttgatcagcttcactcttcaatgattctaagtttgctttttgtttttctaaatcagtcttagtagcaactaaacttgctttagtattttcttgttctgtcttcaagccgcttaattttgccttagcgctgttaacatcatctaaagcttctttacttgcttggtttaatttattaattgtgaatgaacgcgaaactaaatctgaaaggtcatttgagtttaaaaggaagtcaacatatacgttcccgctgacagcatccccactcttttcttgtaaggtcactaattgtttcttcaatacgactgttcgtttagaaacttctttttgagcatccgtaatttgacctgaaagagattcgatttgattatttgctttagtaattgctgcttcttgatcagcaatttttgaagcgtttgttgaaatcttttgatccaacccaatcacttctatattagctgattcgatttgtttgagcaaatcgtttgttgcgttcttattagcagtaatcgcttcttgtgcttcacttgaagttgcagcagatactacgtttgttgaaagaactgaagctgttaataatccaagagcaattgtagtcgtaatcgtttttttaaatgacatggtttattttctcctattagttaagcccgaactctgagactaagtatatagggcgaatgttacattaacattacataaacattatgcttacttaacaaatcataaaatataggctttgtaagcgccttttacgactttagaagccgatttcagagaacccttccttattatttccttatcatatttaaaaagatgacgccgaattcattcagcgtcatctttttattagtcatttataaaagtcacttcttcatgctgcgtccaactatccaagcgcgcacttttcagttcaattgcgtagataatttcccgttcacgatcttctgctgataaactatccataaacccagggacttgggcgttgtaataatcagctaattcatctaacttgtactgcgcgcgataaacacgcaaccggctgctagcaatcgtcattccttcgctagttggcattgtgtgaattgccgctaaaccacgatcgagttcttcaatcttaggggtatccggtgctgtcccaaaataccaaatattcggtgcatcatccaacacgataaaccgcatttggcggcttgaaggttgcccattttcatccgaagtactgagcatcatttcatttgtttgattaacgaacttctgaaatttgcgcaaatcattttgatgaatatgcggattagcgttttgtttatcaatatacgcgattacttcatcgatcgatgtaaactgtggttttggccgttgaacagcatcccgtcacttttaagaatatctatgaaatgcaagtaactgctaacgtctttcttcccaaagactcgacggaaactgtttttccagcactaatcatcggtgctcccatcggtgccgttaaagaacaggcagctaacctatatgccattaagctcgctgaacaagggtttgtaaccgtttcatttgatcaatctgcttggggcgggagtaacggtgctctgcgcaacgcgattgcccctatcttatatgcggagaatttctcagcagccactgactacctaaccactctagactgtgtcgccaatgaccgtattggcttaatcgcaattggttcggccggtggtttcacgctcaacgcactcaaaatagacgcacgtattaaagcacttgcaactattaacttaaccgatatgggtgccattgttcgcgaacagcgtgatgcactaggcggtaacgcattaatcgaggaatcctcacgatcccggacattagagattgcaggtcaagcaaccacttacgcccatggagtacctgaagaactggacgaaaactcaactgatatcgaacgtgaattctacgacttttatcgtacccaacgtggcgcagccaactcgacactccatcccactcgtacaacttttactaaactattagatttctatccattgcgcgacctcgaaacgatcacagaacgtgccatgctctttgttgttggtgaagaggcatggtcacgacatttcagtgaagccgcctttgccagtgctaacgaatcaaaacagttattaaccgtaaaagcagctgggcatgtcgatttatatgatcgtatcgcgcttattcctttttcagaattaactcaatttttcaccaaaaatctataacaacgcaaaaaaataccactgacagcgaattgtcagcggtatttttatattatttatcattcaagtaggctttgactacctgataatttttgaagcccccactcaagttatacacggatttaaaaccgaggttcagaagtaaattctgagcagcattagccgtaacccctttattgcaataggtgacagttggaatatccatatctaattccgtgaaccgatcacgaatttcagcaagcggcatgttaatggcatgttcaacatgctcgtccgcatatttttgcttcgaacgtacgtccaaaatctggaagcgttcaccttcagccaagcgttgctccaattcagctggaggcaagagcggccgcccatgcaatgcattatcgagcgccattcccgtatagagcactggatccttagtggttgcatagagtggttgataagctagatcgagatggaataaatcggccaccttcgcacccaatgtgatggcagtcacgaaaacgtcaatccgcttatcaaccccatctttaccaatgatttgtacacctaataattttcccgtttgacggccagcaatggctttaatgacgttttcggttccatttaagtaatctgcatgccctggtttaatgttgtagagtacttccacatcatagtccttagctcgcgcgactgcttcagtaaacccagtctgtgcaatcgttgtatcgaacaaccgaacaatccccgttccaagaatcccgcggtgcgttaagccaccgccagtcaatgaattgccggcaattcgtcccattttattggcagtcgaacccattggtcgatacagtggtgagccatcaattacggagaaactctcaacaacatcgccgaccgcgtaaatattcggtacagtcgtcaacatttgttggtcgaccttcaacgcccctgaaggtcccttagctatcttcatatggtcgaccaactgcgtttgtggttcaacgccaagtgctagtaggaccaaatccgtttgaatggtcgtctgattactcaattctaccgccgataccacaccatcctgcgcagtcacttgttttgcggttacactctttaacacatgcaccccgttagcacgaataacttgttcagcacgataggccatatcaccatcaaaatgggtcataatttgcgcgcttcgttgaactaacgtcacgtccaagccacgtttttgaaattgttccatcatttcaagcccaacataaccggtcccaaaaatcgtcacattttgaactgaatggtgctgtaaatacgcgtcgattgcgcgtgtatctaccatgttatgcatcgtgaagacgttttggtaggcttcatcgaacggtgcaataatgcgtggcgtggcccccgtcgctaaaactaggcggtcataataatcttcaaacaactcgcccgtctcaaagtttttcaagaccagcgcttgttggttttcatcgattgaaatcacttcgatacccgtcataatgtcaacgttgaagcgttttttgaaccacgccgcatcgcgcggaattaacgtctctaggtcttcaacctcaccccctacgtaataaggcatgccacaaaccgaataagaaatatcctgacctttttcataaacgacaatctcatcaacttcactatttcgccgcgcctttgctgccacactcgtccccgctgcaacggagccaatcacaacaatcttcatgatcatcaccaatccttattatatttaaagacaatataactcattttaatcttgaatgaaatccatttgttttcgactcccaaattgcaagaacaaattagccacacgataaatcctattaaatcagtattttcattaatattcatattttatggacttaacttaaccggcggaagcagcggagaaaagctctttgggtgtttgatagccagtttgccggtgcggtaaattgtttagctttgactcaactgcttggatatcatgaggacccaaaatatccatggatagacccttgggtacatcgcggcggatcattcgattatgcgcttcgttagtcccgcgctcagaggaacgatatggatgggcataataaaggtcagcgacaccggtaagtacagcgccaacttccgagaactcagcgccattatcggcagtaactgacttcatgattgatccgtattcttgacagatcttggccagctcatagttgactgaatcggcatcacgaccatctggatgtaagctgattcctgagaaaacttttaagagagggtataatgaataaatcatctctcaaaaggaaggaatttttacatgccaactcgttacgacaaagaattcaaacaaaacattatcaacctatataagcaaggcgaatcagctgcccaactggccagagaatatggcattggctattcaacagttcataagtggatccaaggccaggccaaaactcaatccggtaaatcgccagacaaaatcaaagcgatggaaaagcgactggcttcgctgtctgaggagaacgaaatcctaaaaaaagccctgggcttccttgcgcagaagtaaccaatatctttgattacattcaccaagaaagccatcaccaccaggtaaccaagatgtgccgaatcctccgagtttcaaaggtcgatgacagtgggctcgattagcttcgtacttagcttgtgctgtttctggtgagtatacagcgtaatattggcgttgaccattcactttttttacttggtcgatctcgccgcggcacaattcattattgattgtttgatgacaaacattaagcgctctggcaattgcacgattggaatagccttggctgtgcagcgtagcaattctgcctcgttcaaacgaagttaggtgctgaccttttttctgactgtggtattctgttcttgcatcaagacaataacctctttcattgtttgtgtaggaacatcaatgataacagagattcgtcttggtgttttttattttatcaattagctaaaagtatttggctaacttgattataaaacgcgcgatttttatttggaggttcttattatgtttaatggtctattcaaagatctaacaccaaggtcgtttactggtactgcgtcgagttattattagtatcgtgggtctctgtgtcttttcagctttctttattatctttggtgctaaagtaacttttgaaattcttgcaatatttgctcgagatacgactacatttgtcactgtgttgctttacttgctttcattatttatttttttaatcgggttcaaaaccaagattactcaaattagtgttgttacagcctggattagtgaagtacagtttttatttttgttattctcgccaatttggcaaattcacgctggaagagaagttgcgttctatgttattttggctatgaggattctggtcacagtattactggcatttcttttgtatctatatcatcgcaacaataaagcaaatcgaaaataccgtcgataacttaatacaaaaaaataggctagcccttgagggactagcctatttgaatatcatcaataaaaatcgcgttcaaattgcattaaatcattgattaaagacgctgcttgcttcaattcagcatctttatatttttcggtcaccttatcaataacttgcgctttcagcgtttcatgcattttatcgtggctttgcgcaatcacacggcctttagcggtcaaagaataatagatttttttctgatcatctggttttttagtcgcttgaattaagcccatttgaatcaacttcttagcggcgcgtgtaatgccgccacgcgtaaccgccaaccgatccgctagtgctacacctgttaattcttcggcctctaatcctgataatatgtgcaatgcaatgattgatagctgcggaatcatcgttttcaagttctcatcactcagctgattttgcaaccatttttgttcttgaacaccgcggccgttgacactatctgagcgtaattgcttgattgcatgatagagtgccatcactgattcgttttccatttgcttaacctctcatcaattgttaccaccagtatacaccaaattagaatactttagctttggtcgtcgcttccgttagggcccgtgctaatatttgttcacgttgatctgcatgagcatccgcgccttcaatatagacgtgttcaacttgattaacaccatagaatttcaacatattggttaaatacatatcgcctaaatccataagtgcagaactttcgttactcctaatcttaaataaacggcggaacaagaacttaacgatcccccacttgcccccagcgtgataaacactgccagctgcttggatatggattgctttcttaccttctaacaaacctactgaaccgttcggtgtgtatttgaatgttttgtgggcgaccgccgtcaaatctaaatattgtttcatctcagctggtaaaaaatgattgtacattggattgatgaagacatatttatcagcttcgataaattcatctaaccaatctgcgtgttgttgtaatagtgttttctcagcttcagccattggttcgtcaaatttttgtttacgccatgcagccattgtcatatcgttcaatggtggaacacctgcttcagtatatagatctcgaataataatttgatcatcaggatgggtccgacgataagtttctacaaagcgggtccctaccgctagggataaactcttttcaacatggggatgtgcttggattactaataatgtactcatttaaaaaaaccttctttagtttcgtttagttgcttgtcaacaaaataaagattaccatcgttttagttgcttgtcaacaaaatgttttaaattaccgttagctatcaaatttagctgaagtgccctagtagcgccctaacgtgtcatttttaagcaaaaaaaataggctatcccttgagggactagcctatttgtgtaagcttattaaacatgctttttaaagctgactcctgcgcttagctacaatccgcaaacaatcgactaacgtcgattattcacgaatttaggctaatgctcagaatcaacccgctttaaacacactctttaataattagtttaatttcttcttgcttacaacattcaagttttcgtctaaatcataaacaactggttcgcctgttgccatttcaacgtccatgatgtcttcatcagagatgttttcgatgtattttgttaaggcgcgtagtgagttaccgtgagcggctacaatgatattttggccgtcgattaattttggagcgatttcgtcttcccagaatgggataacacgttccaaagtaaccttcaagttttcgccaccaggaattgcttttggatctaagtgtgcgtaacgacggtcgtttgctgctgaaccttcatcacttgcatccaatagtggaggaagtgtgtcgtatgaacgacgccagatgtgaacttgttcgtcgccccatttttcagctgcttcagctttgttttggccttgtaatgcaccataatgacgttcgtttaagcgccatgatttcatttctggaacccataattgatctgaaccttcaagtgcatagtgtaatgtcttgatggcacgagtcaatactgatgtgtaagcttggtcaaaaaggatgccttcttttttcaataaagcaccagcgttttgagcttggcgtacgccttcttcgcttaagttaacatcaacccaaccagtgaattggtttgataagttccattcactttgtccgtgacgaataaaaactaatttagccatgtgtaagtaacctcactttttttatttttactctgttcattttacactgtttgctacacaatttacagtcttatcttttcagaaaataatgaaccttctttttttatgctcgatcagtcgttttcgtttctttcaataagaaaagcgccgccaagatggcaatcaccatgagcactagcgacgtcgttacaacagcgatcatccctttatcaaaagccgtgacaacaatttgttggacctttgcggcatacggtgtcttcactaattgttgcccccacgcgattgcatgtcctgaaaaagcacctgcttcaaccaatgcttgctgaatgccagttgctgccgccttcgggattgagctgccactaaagctagtcttcaaactcgtttcgtaggcattcgtttgtgataaaccgagaatcacaacaccgacggtaattccaatttggcggaaaacattcaataaaccggatgccattccgatttcttgaggattaatattatccatcgccgctgtattgatcattggattgataatcgcattgcctaacccagttagcgcaagcaatggtaagagttgcatataagtaaaatcagtcgttgtcacttgtctaaaaattaataaaccaagggcagaaacagtaaatccaaaagcaatcaaccattttttaccgaatttatagcctagaacacccgtgaatggtcctaaaacaagggaccataaactcattggcagttgatgcacaccggttgaaaaggctgagtaacccatgtaattttgcatcaaactcgtttgataagcggctaaggcaaaaatgccagcgcctaatgagaaagctaaaatcacaacacccacgaaatggcgattcgtaagtaacgtcaagttcatcattggtgcttttgctttcaattccacaaagacgaaaagcgctaaaattaaaacggaagcaactaaccaccccataatgcgcatatctgtccaatcccagtgcatatgttgttctttttgaatcaacccataaatcccggagaataaaccaattgctgacaagatcatccccataaaatcgattgattcgcccgcgccataagctggtgtttctttaacattgcgaatcactaagtaaactgaaataatcccgactggtaaattgacgaaaaagatggatggccagccgaagttttcgactaaaaagccccctactaagggtccaatagcagttgaaaaaccaatcacggagcctaaaatccccagtgcagtcccccgttcacgcccttcaaagttcgacgccactagtgccatcgataaactcatcatacccgagccaccaatcgcttggaccgcgcgcccgatatctaataccaataaatttggtgccagtccattaacgacagaggccgctgtgaataaaatcatactcatgataaaaattttcttgcgcccgaacatgtcccctaatttggaaacaatcaacaagctgaccgcatacatcaacgtataagcgttcaaaacccattgtaagttgctaaaagttgttttaaaatcaatcgccatacttggtaaagcgacattgacgacagttacgtctagcaatcccataaagacacccagactcatcgcgaccagcgctatccagcggttggttgtttttttcattttactatctccattttctctatctcatttatttgtgcttgtagccaatccattttggctttgatcgttgtgattacgaaatcggttgaacgaatctgccaataataataatccgtcattgtctcatccgcatcttttaattcagttagatgtttttccacaccgctataaacatgtaaatcttcagccaactcactgtagaaatcttgtaaaatgctgacttgttctgctgcatcaatgtagtgcatcccccgcatcttaaaacgataagcatcatcccacttcgcatcatgaacgactggtttagccattaattcagcaaaatagcgccgtccctcttcagtaatgtgcgcaatcttcgtaccacgtgaatcctgatcagcttcctcaaacccaatgcagcctttgctttccaatttatctaacaacggatacaaaaccccatttgaaattttccgtctgggcaccatcgcattttccaagataatccgcaacttatagcccgacatattccggctcattaaggcggataacatcagcaattcatacataaacgcataacctctctctttaatcagtcttttagacaggtctttaagacttattaagtctagttctttccgacatatttacaagcctttttttcatttttagacaaataaaaaaacatgatccgcataagttgcctgataacaaggcttcatgcggatcacgcttttatggatttagggatgtataggttgtacactctctctttcaactaattcaattgaaagtactttttgttgtggcgcaatagcaggctccacaatccggttcaataatagacgtgttgcttcttgcccaagctcgaaaatcggttgcttaatggtcgtcaattttggtgtgacatattcacaccaatcgatgttatcatagccaatcactgagatatcttctggcacctgtactcgtaattcacgtaacccacgaatcaatccgatagcgagttcatcattgattgcaaatacagcagttaccccgctatcaatcacctgtcgtgcaacttggtaaccacctaatttcgttaacggtgtcgttatttgccactcatccgccactggtaattgggctttcaacatcgcggcttgataaccaatgaatcgttgttcgatgttccaagctcgttgttctggtaaaacaattccgactttatgatggcctcgttcaatgagataccgtgcggccaactctccaccttgcgtatcggcaaccgtaatttcatctcctgcatgttgtttatctgattgatctaataagataaacggaatttgtcgtttttgcagatagctatccaacgttgttttttgtaaatgagggacagccaaaataaagccgtcaacatttcgacgaaccaattcctttaaataatgatcaactttctgattatgcgcccctgcactataaattaatgggatgaaatcgaattgataggcaatttcttcgacaccttgaataaactgactaaaaaaaggattattgatatccggcaccaataccgcgatcgtcttcgtttctttattaatcatattttgcgcgaaataatcaggttcatactgaagtctttcccgagcggctttgacccgcgcaatcgtttctgcgctaaagcgctcacctttattattaagaattaacgaaactgttgtgaccgatgtttgcgccagcgcggcaacatctttaatcgttacttttcgaaccattttggcactcccccgaatcaaattaataaaaacgcccacagccggctagccatggacgctgttaatatgattataactgaatatccttttcataaggaatcgaattttgcgcccctttagtttggactgcaatcgaagaagccttattggcataagtcattgctgcttcaatgttactgtaatccaattcaagtttcgtacttaaagcaccgataaaggtatcaccagcagcggttgtatcgactgcttgaactttaaatgccggtacaaacccggttgttgttggtgttgcatagaatgagccctttgccccaaccgtaatgataacgactttaatccccatcttaaacatcgcttccacgttagctttcattgatgcttcgtcagtcactttaatccctgtgataatttcagcttccgtttcattagggacaatcatgtccgtcactgccaataattcagctggaatatttttaatcgctggtgcagggttcaaaatcgtttgaacgccgtttgcacgggcaattttgaaagcttcaataattgcaggaataggtacttcgaattgagcgacaattctgtcagcatctttgatggcttcttcggcttcatgaatatcatcgactgtcacatcttggttggccccaccatagattaaaatactattttgtccactagcatccaccatgatgtaagcttggccagtcccagctgtttcagaacaacgaacgtgatcaatgttcatgccatcttttttgaacgtatctagcatgaaatcagcggcgccttccttaccaaccttactaatgaaagctgtttgcgcacctgaccgaacagctgcgattgcttggtttgcacccttaccaccaccagcaactgcgcggccatccattgctaatgtttcacctggttgtggaaaacgctgaacgtttaaaattgtgtcgacatttgttgaccctaatacgattacttttttcatttgaaagccctcctaatggttaaaatacaacgccactttctaaaataatgttggaataaggtgtcatttcacccgtccgaacaaatgctttggcctgccccaagtcctgtttcatttgtgcgtgatcaataaattcaatgggcgtctcaccaatcacttttttgatttgttcaagttgtgctggattagctgttttaatttcgtttgctaagtaaactttttgaatttccaattctgttagaacatttttaagtacttgaataaaacttggtacaccattttcgatggccacatcgattttttgcgttccagctgggaccggcatcccagcatcgccaatactcattgtatcaaaatgccccatgtttgaaatcacatttgaaatttgtgaattgataacttgtgtttttcgcataataaatccgccccactttttatttgataaaggctgtcacagatccagccactaatacgagtactaaaccaattaatacggcaaccatttcttttttggtcttttgttctttcaacacataaatcccaccgattgtggcgaaaatgacactggtttgggataaaacaaaccccgttgctaagccattcacagaaggttgtgctgagataagatacgtcagcgctgcaaacgcgaagaagaacccactgaagatattcttatacgaagttgcttctttgaaaggttgataagtcttgctggtttgggttaatccgaagataacacctacaattgccattcctaatgcttgtggcaaaaagccttggaaaccgtccgcgtgtactgcttgtggaaaggcggagtaccctaggtagcctagttcgccaactaataataacaagatgccacgcaccgcgccatttttactagcgcttgaacgatcttcactccaggctgttaaataaacaccaaggataattagaataatcgctgtgaacccaatcaacttcgattgtgtacttgcccagttacccaagatgaagacgccccacaaagatgccccaacaagttggaacccagttgtgattggcatcgttctagaaacacccatggtttcaaaaacatgaaaggtgataatctgcgctaatgcccaacaagcccctgaaattaaacaaaaaataaatgttttggtttctggaatcggtgtcccgcggaaaatagccacaataatggccagaattaatgtcccaagtgtcgttccaataatttgactcgctggtttcccaccaattttaccaacgatcacagggaacaatccccaaccaatcatcggcattaatccaattaagatattgacagcattcatattcaatcctccgtcctttattctaggctagtaaaacgttttactaactatcatggtgattattataaaggagcttctttgagaattcaactcttttttgtaaccgctttattaaagaacacaaaaaagattaatctggcgcgcatttggcctgattaatctttttttaatttattttttctttgcttgtccgtatcctcgtttagatttataacctgcatctaaaatttgacacatttcaacataatgtcgttgctgtgtttcttcagctttagcgccgtaaacataacgtgcccattcgcgttgatagcctggtgttagtgcgtcgaaaaaggtttttgtggctggtgtatcttctaatcgagcactcaatcggggaatctcaacttcatattctgatagtggtttttgtggcatggtgcataactcccttattttaaccgcataacatctctggcaatcatcaactcttcattagttggcacaatcaggaccttaacgcgtgattgatcactgctgataatgcgttcttggctgcggacattatttttatcttcatccaattctacaccaaaacaagcgagttgttcacaaatggcagcccgtaattcactgccgttctcaccactaccggcagtaaagaccagcgtatctactccattcattaaagctacgtaagaaccgacatacttcacaactcgattgacaaaaatatcaagcgccaattgggattgtggtcgtgagtcagcggtttcttctaaatcacgcatatccggtgatagttcagaaatccctaataagccagacttatggttcaaaattgtgatcatctctggcattgtcttacctaatttttcagctaaaaaggctactaatgagacatcaatatcaccagatcgcgtgcccatcgtaatccccgcaagtggtgtgaaccccattgatgtatcgacagcgtgcccgtcttgaatcgcggtaattgatgcaccactgcccaagtgcaacgtgatcattttttgcgtttcaagcggctgatctagcatttcagccgctcgatgagcaacaaaccgatgactggtcccatgcgcaccgtatttacgggccccatacttttcataatacgcttgcggaatactgtataaatagttttcggcaggtaacgtactgtaaaatgacgtgtcaaaaacagccacttccggtacgcctggcaataatgcagtgaaaattttaatgtaataagcttgggttggattatgcaatggtgcatattcagccaaacgattaatctcatcaagcccgaccggattaattactgcagagtccttgaaggcttctccaccagcaaccacccggtgaccaacccccgtaatctcatcgagatgggttacgatatttaattccttcaaccgcgttaataacaacgttgctgcttgttcgtgcgtcgtaatatcttggacttgtttaaacttttcctgattgccatacttcactgtgaatacagaatcagataagcctaaccggtcaatcattcctttagcgattactcgttcagacggcatttcaaataattgccacttcagtgttgaactacctgcattaatagccagaattttttccatgatatcgactcccactctttcataatccgttcatggcttaattgtaagcaatttcataaaaagaaacaagccctattatatcagagtgcgtcatcaacgggtaacttctgagcatttatctaacttagcgaattggcgatgcaatcgccgatttgataagtgtagcaaagcacaggaagttattgatgaaagcacgtttaaggcaagaatgcatttggttgcggtcagcaactgagcattaatacaaactagcgcttaatctcgattttaagattaagtgctagtttagattaagcggaagttgttgcaaccaaaaagcacgttttatccataaaaaaagaaccgcccccacgcggttcttcctatttcataataactattctgcactttcttcgttcattttctttactttatttaggaatgaacggcccatcttgttatcttggtattcacttggttcaatgacatctaaatagaattgatcaatgaatcgaatcaaaccatcgactttatcacggcccatttgtgcttcgatttcacggtatttttcaacatagcggctcaccaaccggtctaaaacgtcttgaccttgtttagttaagctcaaaaatttaacccgttgatctgtttgaagatgttcttcaaccacgtacccattttctttcagtaaccgacattggcgtgaaattgctgaacgactaacactcatcgtcttagctaacttactacctgttaagttttcgttagttgaaatttcgtacataattaaaaattggtcaaaagaaactttgtaatttaaactttctccactgacaaagtcgcttaaattgctgacaatccaccgataaatcaatgaaagatgcgttactacttcccaatcatcagaatacttgcttgttgcttttgctgtcataaccttttctccctttactaaccgatctgtcatgcgtagaaacaattaacggatttaatttattttgctatcaatatattagcatattttgagagaaaagaaaccactcgattcattaaatagctataaatagatttgatgtgcaacaattcaattgaccatataatcatcaacccactatattagtttgtcgtgactatataaaaagaagtcattaaagataaaattattttcatccttaataacttcttttaataacatcttataggttacgatccatattgaacgtcaatttcgataaattaatgcccgacataacgagttccccaatcatcgaggtcgcttcagtcgccatctgcttaacaatcgcatggttttgctcagtcaaatactccgttaaggcagcgccttgatacttttgtgcttccacttgaatggcttcaatcatcgttcgcaattcttgcttacaacggtttaagtaatctacattgccttgaatgtactggctataatggccttccaccaatactgaaattgtccggtataaccaatatgcactcttcatatcccatttcattggtgtttcgctgaaacttagatccgtatcgttcgcattcgtgaaaaatggaatgaacggtgtatacgttggcatccccattgtgatccacatgatggccgcttgttcctttggcacatcattccgtaattgtaaaatatgtgcattttgcgtccgattcaaaccgattgggcggtaacgatacttgtcggcatcagtcccatgccccattggatcgaatggcgtttcattataatgtgagcctaacaacatttcaatatcttcaacactaattttatgttcaatacgccgaataaatggtaattcagccgattcgggtgacatatcaaaatcagcatcaaataaatgatgggcgtaccaaacccgtggtgtattatagtgccggtctttttcattcatcgtgccaaaaatgtggcggaaattccagcccgttttatccggattcaaatgatgggcttcaacgtattcttgaatgccttctgcccacataaaattgtcggcatccgtgaaatcaacttgttgaatcgccacttggttggcggcaactgcataagcatcatctggaatccgttgtgctagccataaatgccctgtcacaatttccatataccacacttcattgtgatcactaaagagcacactattgccggcgggtgagccgtattgtttaatcaaattaccgagatagctgaccccttcgcgcgccgagttaatgtacggcgcaaccatagcttgcatgcaatcttcatccaacccgtctttcaccaatggatcataagcgagggctttttcatttccatatgtactttcggtacagctcatcgccacgttaacttcgttaatactactttcatcataataaccattatgtttgtaatcaacattcggaacagcgggccatcggtagccattctcaggtaattcggcttcaaacccgtttaaccaagatttaattttagcacccttacgccctttaacagctggattgatgtgaaaccgttgtggtgttaaaggtaaaaaagtatcgtcgttacgcgcaatcatcgttgatccgtccaatgatgcgtttttaccaactaaaattgatgtacatgctgattccataagttgcactccctctgatgaccactttaattgaactcatcggtcacgtttgattaaaattttctcataattaatatccatagtgtacgcttctcacttgcgaaagtatagcctgatttgttgattaatttcctttaacccccgcatttattgcgatttctatacaatattggatttcacgttaatttccgatttcggaattatcgtcaaacgaccatgttagcgctcctaatttcatgatatattattagatgaataactaacaacaaggtggtttctcaatgaaaaaattaacacttgctctgttgctgaccatgaccagctgtttcatgattctagctggctgtcagaataaaacagaaattccagctgccgcaactaaaacagaagaaaaaattgatcaatacgtccaaaaagtgaaccaactctatagtgatggttcccgtaaagatcctgcgaagttaacagccaataaacaacaccaaattatcactgcggctgacaaactcgacaaacaaatcacgcccaacctttatatgagcggaattagcgctgatgcaaaggctgattacaaggctgcccaaaaagatctagataagattactggtaagcaaccagcaactagtgaatctgaaagtgttgcttctgaaaagcctgctaaaaagaagaaaaagaacaaagttaaaacaagcgcctttttcgataaagatgggattgtcaaagccgatgcacaacttggtgaagaaacggactataccgaccaccccaaacaacttgctgattatcaagaagctaaaaatcaattagcggctatggcagctgtccggaacttatttacagacgacaacctcaagcatattccagctaacctatctgctagcgacttcccttatgtccgagctttgattaataaatcaacccatgacggctttaaagaaaagtacttggcgtatgttaagaacgctgaaaatcaatacaacacttactctaacaatacccaagcggcaaccacgcaaaacacaacaaccgctaatcaagcaacaactaaccaaaacacagctaccaatacacaaactacgacaggctatgctgctaacacggcaacggggaatggcactggtgcaacaactggaactgggacggggacttcgacaacggataccacaaccggaaccgggacgactggtacacaaagtaatactcagaccggtacagatcagacacaaaccggtacactccaataatcttaagacacttcctaaaaagtacgctatcttcttgatatgcgtacttttttgacgttcgcttacgtttagtcttttaatcgccgatatcttaagaaacatgtaacagcgctctaactattatgtaacatgtttgttactttcagatgctatgctaatcagcgtactaaattaattcaaaattcaaacaacttaaaaaaatttttcgaaggagcacaacaaacacatgaaaaaacaaaaaatgacttacttatcttctggaatggttggccttgccggcttagtattgatgggtcttcaaacaaatgatgcccaagctgcaacaaatggtacggttaactacgctgacggggcaacaaccgtttggactagcccagcagtaggtcaaaaacctgctcgttacttggcaactaaccaacaagtaacaatccaagacacaaaacaagtttacggccaaacatggtacaaacttggtaatgacgaatgggtttcaagccaattcattacagccggcgatgcaactgctcaaccagctgcaacaacaaccgctgttaagaacacagtaacagctaacttccaatcaggtgcaacaactgtttgggctgacacaactgctgctcaaccaactggcgaatacttaacatatggcacaactaaaaacgtcattgatcaaaaagatttaaacggcacaacttggtaccaattagaaagcaaaggttgggttcctgctagctacgttgttttaaacaaccctaacttgaatggcgtcacaccaattacaaatgcacctgcagtgacaccagttgttgcaacaaccactacaactgaagttcaagcaccagctgctcctcaagcaacaacgccggcacctgctacagaaacaccagcgcctgctgcaacaactgaagcaacaaccccggctgctacaacaagtacaccagcagcaacaacacaacctgctcaaacacaaacaacgacaactcaaagcagccaacaaacaactcaagctacaacaactcaacaagcaccacaaacgaatacaacgacaaaagcaagtggtaacgcacaaactgttatcaacgctgctttatcacaaatcggtacaccttacgtatggggaggctcaacacctggtgttggtcttgactgttctggtttagtgcaatacgcatacgcacaagctggcgtttcattgggtcgtgtcacaactgctcaagaacgtgctggccaacgcgtctcacttgataacttacaacctggcgatatcctcttctggggtggcgctggtgcttcataccacgacgcaatctacatcggtggtggcaaatacgtccacgcaccacaacctggcgaatcagttaagacagcaagtatctcaagctacttcatgccttcattcgcagttcgcgtcctttaatcaaaaatatgtatttaaaaagagccacatcttaggatgtagctctttttttgtggttaaacttagtttaaaatatatttattttccatattaaaagaccatccaaaggctgcttttcaagcgacttttagatggtcttttaacattattttgaaaaaaattcattataattatttagctgatttacgttccttcaagaagttcaatacagcagctgtttcagcgttacgttttttagcattgttttggttaacaggacgacggttaccagaaacactaacatgtaagttttgtgacattgcgcgtttcctcctttcgtgcatatattctattattctaatctgaattgacttatttttcaagttaactttattcgtcttttggttttctgaaatagtttaggagccaactggtcagcggaacggttgctatgaccccaatcactccgattaatagtgcgagtccctcaccaattaaaattttatggttcacaattttactaattggataaccgagttgaatgaaccacatcgttaatgacaagaagctaccgaaaaaactaaagaacagtgtgttaaaagccgtcgcaataattttttcaccgatcgcaatccccgctttaaagagttgcttggagcccatttgcgcgtcgtattctaagatttcgactaaaccactggcaactgcaatactcgtttcggcgattgcccctaagctgcccagaatgatcatcatgatactaattttttggaacgacaagccgattgcgagtccaaagccttcaatctcttctgcatcttccgcaccaaagccgtaggtagctgctaactggctgaggggcacaataatgatcagcaagcccaccaccacgattaacgacgtcacaaacgccgtcttggccgttaatggctgcttggtattcatgaagatggatgtcgctaacaaaatcagactcaacagaccactcacaatcagcggttcaaacccacccgccaccaagaccagtgccaatataatcacgacaaaattcaaaccaaggctgaagaaaatcgtcagcccttgccaaccacaaaccagcactaataagatcagtaaaattcccgttagcaacatcataggcgtctcacccgcactaactggcttgccaacaagctcgttactggcaccgccaaagtaatcccaatcgcactaatcaccgtctgcgtaaaacttaacgtgacagttcgcgataaggtatacgcaattgtgttgccattgcgtagatacaataaaataattggaaaagcatccgccatgactaaaaagaacaacacattaactaacggaccaataatttcgcgaccaattgcgagtcctgatttaaacaattcagtcttcgtaacgtttggccgttcaatcgctaattgctggagtgacgatgaaatatcggtcgtctcatccatcacagcgcctaaaatcccgagcacgacttccgctaagaagaccgttttatacggctgtaattcataggccatcgtttcataatgcaagccttgatcgccggttaatttcaagacggccatgctgagaaacagtgctaggaacgttgcgccaattgtcgcgccatatgagacaagcatctggcggttgagtcctaatactaaaagtagcgttaaacccgttagaacgaccgctaagccacacataatcggcaataaccaccgtccacccgtcatcgcgtttaaatggagtgttaagacgaatgcgacgagattgaccaagacactgattagcgtcatcaatccgcgcttgagcatcattagtaataggaaactaaacgtcaacagtgttaagccaacgatgattgtatcgcgcttaggctcgtttaaggtccactttttcaaatattgatcacggtgtaaaaagacttgttgtcctttatagtaccgcgtcgacatcgcttgcgacgccgtatacgtattgcgtagcgtaatcacttgccctttttgcttagtgttcaaaaattggcccgtgacccgctggactacttctgtatcttcattttggtactcatcagtctgtttctcacggctaattgtctggacccgcgttacccgaataatcggttgctgatacaaaccagcatcgaaatacgtccctaatacaccgaggacgcagatgacacttcctattagaccaatccacagccgtttatgttttaccacagtcgtcacctctgttttattctagcgtttctgcgggtgaacgtcagctttttgaggctgatttaatcattatttaagcgactattgaaaatcccatacgtaaagtagaccactaagccgatgacaaaccagattgccgctgcaatccaagtgacttttggcaattcaaacatcatcaataaacatagcgctcctgatattaacggtaaaactgggtaaaatgggactttaaacccatttttattcggaatgtccttgcgcttccgcaatgggatgaccccaatcgacatccagaaaaaagccaccaatgtgccgatgtttaccaaattagtcaattgatccagtgaaacgaacccgcctagaatcatgatgactaccgtcacaattttgatactgttagttggggtttgatgttttgcagtcactttaccaagtgcttttggtaataagccatcacgaccaattgaatagatgaggcgggaactgctgtaagtcatcgtcaacatcatcgtgaacatccctgctaatgcgccgagtgaaatcagaccggcaaaccaattttgatggacgacttgtagcgcgaatgtgaccggattagcaacgtccaattcgcggtacgacaccatccctgtgaggacaaacgccactaatatataaagcaacgtacagatgattaacgtcccaataatcccgataggaagatttttttgtggattcttaacctctgccgccgatgctgacacacagtcaaagccaaggtaagcaaagaagacgagtgatgcccctttgaaaatcccacttaccccaaacggcatgaacggttgccagttagtgggtttcacgtagaaaatcccgacactaatgaaaagtagcactacgcctaatttaatcaaaaccatgatgttattaattcgtgttgatgaacgagtccctcgcattaataatgtcgcaatcaagcccactaccagcatcgcaaacaggttcacataagtgccatgtgccggatcaaacgggccagtaattgcatgcggaatatggatgccaaacccttcgataaatgatacaaaataagccgaccaaccagttgaaactgccgcaactgacaacatatactccaagaataaagcccagccaagcagccaaccgattaactcaccaaaaataatattgccatatgagtaagcacttcccgcaactggtaatgccgatgaaaattcggcgtaacacatcgccgcaacggcacaaacggccgccgcaatcataaatgaaatcgtgattgccgggccactatgtaacgccgcaatcgttcccggtaagataaaaatcccggtcccaatcactgcccccacgcccaatgcaattaaatccttagccgttaatgttttggccaaccgctgatcttgttgtaaataacgttccagtgattcttttcgtaacatctttgccattaatcccattttaaccactcctatttttattgtatgcactcgactaggcgattactcgccgcctaccaggcttcgtcgcactcatttaataacaaaaaaaggagcccactagtcttcactagtgagccccaccaggaagatgactcggggttacccagccatcttccaattcattaaggtttgtcatttcaactcaaatgccttctccttaatcaaccagtcgattactgggtatcttaaagaaaaagctaaaggcaacacgttgcattgaattcatgacagaccctccttgttattaattagttacttagtataggggataaccatctatttgtaaaggattattttaaaagttgtttttctaaaaataatctgctagaatcaaatttaacttattcaaaggatgtgactggcattgaaaatcgcatgctaattttctgacaactcgattggtacgaactgttcatgcacgtgcgtggaccgtttatttccgattgccgttagagattgcttgcgttaattttcaggtcagttacctaaagacttgttaaaagacgctgttattgcgtctttttttgtgcatttttaacgacaactgggccaatctcattcaatcaatgaggtgataattcatgggcacaattcaattcaaagcactcacatttaactattcagatcaaacacaaccgttgttcgatcacgtcacgcttcaattcgacgccagttggaaactcggtttaatcgggcgcaatggtcgcggtaaaacaacgttattaaaattacttcaacaccaactaccatttgatggccagttggttaccaatctcgattttcaatatttcccacagactgttacagaacctacgcaactcacacacgatattctaatgcagctaggtaacctcgacaattcaaccttctggcaagtcgagcgggaactgcggctcctacaagtcgcacccgaaatcgtctggcaaccatttgcttcgttaagtcctggtgaacaaaccaaaatgttactcgccttactattcatcgacgactatcattttcaactgatcgacgaaccaaccaatcacctggatcaagaaggccgccaagtcgttgccaattatttacgccaaaaagccggcttcattgtcgtcagccatgaccgccatttcttaaaccaagtgatcgaccatgtcctagcgattaatcgtgccgacatcaccgttcaccaaggcaactaccaaacttggcaaaccgcccacgaccaacaagctgcttatgagcaacaacagaatcaacaactcaagggcgatatcaaacggctgacaaaaacagcacaacaaaaagcgcagtggtcccacgaagctgaaaaagggaaaaacgccgccagtgtcaaaactgaaagtgccaatctcgataaaggcttcatcagtcatcgcgccgctaaggttatgaaacgggcgacgacaattgccaaccgcgcggaagaagcaatcgaagcaaaacaacaactttttaaaaacgttgaaattgctgcaccactgaccatcaatcagcgacccctcaaacccggtcaaaatgtgcttagtgttgatgaacttgtcttacaacaagacggcgtcatccttaatcaaccactctcattcaccttagaaactggtcaacaggttgccctaactgggattaatggcgcaggtaaatcaacactgattaaggcgttacttgcattacccgcaactgaccacattgccagcggtagtctgcaccttaatccgcacttaaccctctcgtatcttccacaagatttcgatcaactgagcggctcactggccgacttcgctgctgcgaaacaggttgatcacgaacaactgctaagcatgttacgcaaactgggttttgaccgcgatttatttacccaccgtctagaaacgatgagcatgggacaaaaacgtaaagctgcactggcacgttcgctctgtgaagaggctgactgttacctctgggatgaaccgttgaattacctcgacgtcatcacgcgtgaacaagttcaaactctaattgccgagcaacgcccaaccctcctatttatcgagcatgatgttgatttcgttaacgccatcgccacccaaacctacgcacttcgaccacaacactaatccgtattatttgtataccgtgtcacgttatatccgcgcacgttgaagtaagtcgttggcgactcatcatcaaaaaaggccgggttcatatcattaagtcgcgtttcggtattggttaacgtttgttccggcagtgctaaattttcacggagccgattcgaagcagcctgcaaatcttctgtactaatgatttgataggtactgccgttaagccacgccgttttacctagcaattggctgctgacaatttcaccactactttgatgatagttgcgaatcaactgcttcacttggtcggctgtaaaatcagtgctaattttctgaccaagcttagtcattaagtcaccaatgttcatcaaatattttggcttttgaattttttgcgcaacctgtttcaaaacttcttgttgccgcaattgccgcccatagtccccgcgcggatcttgataacgcatccgactataagcaagcgcctgatcaccattgagatgatggtggccttgtggaatcacttgtccattcaaattaacgtcgatcaccgtatcgatggtaatccccccgacaaaatcaaccaattctttgagtgcgcccatatcgaccgtcaccgagtagtcaatcgggagccctaaaaactgactgactgtttttttcgccatcttagccttgccaatttcataagccgcattaattttctgaatattaccgccgtggtcatctgccatctctgccaatgaatcacgcggaatcgagtagaccaccgttgcttcttacgccgggttaagtgcaaccatcatcgaatccgacagaccacgatcaacgcgcccatccgcgcctgtgtcaacgcctaataataggaacgagattggctttcgctgatcaatttgttttgaaattcgactagacccggttttaatcgcatcaacagctttatcctcttgatgcaaataaaaacctagcgccgccagactaatcacaacaatactactgattacaatcacgatactgatctttttcacagtcaattcccctttgtttaaacgcccaccgcatccttttttagatatgaaccaataaatgctgtcccccttttgaatcgttcgattctggcggacagcattttattttaacctttgctttaaccgacgtaagccaactagcatgaccggcgctaagtgcgaccgattaagccatcgtagccaccgggatgtgccggttggtaaaccacgttctaaattgatcaattgcgtctgaatgaattgtcgctcaggaacagtcagtgtgcgctgatcaaaaacaattaacattctaaaaaaggtccgcacatactgctttaaaaatcgtgtgtaagctgcgcgatccacttctgcaattccagccactaattgcgtctcaatgatgtgcagagctgctaagttaactgagaaccactgcggctttagggtactcgtagccgcctcagcatgccctatctcgtaaacatataaaaacgctgcccgatgcctaacaactcggcaatgttgcaaatactgcaagttgaaaattaaatcctcaccgatacgcagcgattcatcgaaccgcaatgcttcagcttcaataatcgctcttcgatacaatttattacatgattgaaagaagacattttgataatagtagtctaaaaaagcccttttgccgtcttgtattgatagtcaccatcttcagtcaaaccaaaagcagaatccgttccgccggctctttcgattttagttctgaatagcacccaatctaccgactgaccgacgactggttcaaataattgggcactgttaaccaagaagtcatcggcattctcagcgtcaagttaagcccataaactaatcagccataaaaaggctgcatcaaaattacttttgatgcagcctctggttcaagcatagactaactacgctttgtttgttattaatctaatttccgttccaactcactaacaatttcagcatgttttgcttccgttaatttaatcttagccatgaagattaacgctgaaataaccaataacgccattggaatgaagaacatgtacattttgaattgcaacaaccccgcgttagtgatatcgcttggtttcgcattcccagtcatgccagcatgaatcgcagccgttacaacgacgccgtttgcaaaagccccggctagtttatccaataaaggtcgcactgccaatgttacagattcattccgtgtaccacttttcaattgtccgtattcaacactatcggtaatcgtcatcaaagcagccaaaaagaccagtggatatgggaagaagaataagccgaccgcaattaagactacgaccaagttacttccagcaaacaagaagaggatataaccaagcatcatcattgcgattccgccaatatagattgcccggcgatgaattaaagcaaccaatgttgggaacaacgcaactgacacaatccctaagatggcagtaatcacaccaaccgttgagaacgctgcggcgcggcccatgacatatctaaaataatataaaagcagtgagttcgtaatcacataactaaaggcaaataagaaatatgaaagagataaccacattaattggtcatttttaccaatcacactgaaaacgtcacgtaaccgaaccttttcagtattttcccgaatagcactcttttcttctttggttcctaagatggtcgctaaagcgcctaagaatgaaacaaggccaatgacaacggcaaaaccgaaccacccggcactggtttgttcactcccatgactcccagaaaatagttgcgagaagaaaaccaccattggcacgatcacgataatgaccccttgtgcacctaaagtggatccgaaacgcgcaatcgccccaaattttgtccgcttttcagaatcaacactcagcgctggcaacattgaccagaacgagatgtctttaaacgagtagaagatatctaaaatgacgaaaacgattgcaaaaagaactaagtaaagataagggctacttgtcgcaagccctccaaagttggtaaaaatcatggccaagccaacagagctaataattgaccccgccagtaaccacggcttaaatttcccccaacgcgtccgtgtattatcaaccactccaccaatcagcggatcgaaggcaatttcaacaatccgaatgaccatcattgtataagtgacatacgcaatcatttttgaattaaagcctgcatttttggtatcgaataattgactcgtgacgaacatcataaaataagtgctaagtgttgcataaaaggcgtcatgcccaaaggccccaaaagcgtaagaactatactgtttaacatcttttagttttttcatttctttagattcctttcgatagtttcttcattgtaaacatgctttcatcaagcacaaccctcgggttatcccgcttgatgacgcactctagtgatagcgatgttcgataattttttccaaaatcgcttggcgttgcttttctttggctgagccgaattggttttcttccaatgaattaaaatcgttggcgagtaaaactgattctagatataacgtcaattgacgcttgatataaaccttattgtcttcattcgtttgcttgggattcccagcgataattgctgcagcaaattggtctggatcgataataattttgttgtcgttcatcctagtcgcttctttctcttttagttagtaaacgtttactatttacaccatacaaataaatcaatctgtacaagaactatcctgtaaacgcattcttttagatcgcaatcttattttactaaacttttagtaaaatgtaaacggttatttggaaaccgttacattcatcactggttacagttatgaatttaatttcactaaatatttatttttttattttttattgaaatttaatttcattagcgctatactgcatctatagaaaacgctttaaaaagaaaggagttgctttatgtttggtttttctatctatcttaatcaaccgttcacctcagcaaaccgcatgaaccttcaaaaaatgcacgccgctggcttcacagaagtcttcacgtcgatgcatattcctgaagatgacatttcacaatacactgctagaatcaaagcactcagcactgcgtgtcgcgaagaacacttacaattgatgattgatattgaaacaagttcattaccagcagttggtctctcacttaacgatcccgccgcaatactgtcctttgggattactggtttgcgaattgatttcggcatcgataattcaaccattgctaagttatcacaatatttgaagattgccctcaacgcaagcacaattgccgaacaagatttagccgttttacgcgcagctggtgccaacttcgctaacatagaagcttggcataattattaccctagaaatgaaaccggtttagaacgaacctggtttactgaaaaaaatcagtggcttaaaacgcaaggtttaaccattcaagcttttgttcctggtgatggcattttacgcggaccacttgaagaaggattacccactttggaagcccatcgttatcagcatccgcttgctagtgcgctcgatttattcaactgtgaaacagataaggtcttcatcggtgatccaactttagcaaaaaccactctagcgcaatttgatgcattctaccatcaacacgtcataaccttgtacatgcttaagtcagccccctgccccccttatctttttaaccaacatttccataatcggcgcgatgtcgcccgtgatgtcatcagattagaagaaggccggccactttgtcagaccacaatccaacctgaacagacatcagtacgattacgtggcagcatcaccctcgataaccaagactatggacgttatatgggcgagttacagattaccaaacatgacctacccgcagattctcgtgttaacgttcttggaaaagtcatccaaaaagatcacgcattactgccattcattcaggctggacaagccatccaactaaaggagattgattaatatggatttaagtcatttaacaaccgaaaaccgtaatcaaaagacaatgcaattggacgaactttcaattgaaaaagtactcacactaatgaacgaagaagatcacaatgtgccagaaagtgttaaacaagcactccccaatattgaagctgctgttcaagttatcattcaaagtttccaaaatgagggacgcttaatttatatgggcgctggaacaagcggtcgtcttggtgttctcgatgccgccgaatgtgtccctacttttggaacagaaccggaactggtccaaggtttaatcgccggtggtatgcaagcaatgaccgttgccgttgaaggggcagaagattcaccgacattaggtcgcgaagacttggaagcaatccacttaaccgctaacgatacagtagttggtattgcggctagcggccggaccccatatgtcatcggcggtcttgattatgccaaccaaattggtgccagtactgtcagcttagcttgcaacttcgatgccctcatcagccaacatgccacaattaatatagaagtcgaagttggtcctgaaattttaaccggttcgacccggctcaaatcaggtactgctcaaaaattggtgcttaatatgttatcaactgcttcgatgattggaattggtaaagtctacaaaaacttaatggtcgacgtgaaaccaaccaacgaaaaattagttgaacgtgccaaacgaatcatcatggctgcaactgattgtacttacgatgttgcggcaacccaatttagcgccgccaacgaagacgttaaactcgcaattgttatgattttaacggatttatcggctaatgaagccaaagaacgtttaacacaagcacacggttttgtacgtcaaactattcaataacaaaccttaaggaggcactattatgactgaaaaaaaagaagtacgcttagccagagaaatttacgccgctgttggcggacccgcaaacgtcgctaaattaattcactgtatgacacgtgtgcggatgacaattcgtgacgatgatcaagttgatatgactgcgttaaaagcaatcgatggcgttttaggggttgtcgaagaagacacgcttcaagtcgtcgttggtcctgggattgtcaataaagtcgcccaaatcatggtcgaccaagtcggtgttaaacttggtgaacccttcccagaaaatctcaccacaactgccacagccgcaacaatgaccgaccgcgaaaaagtcgaagcaaaagccgctgaagttaaggcaaaacaaaaagcaaaacaaaagagtacgccaaccaagcgggtcttaaagtcgatttcaaatattttcgttcctttaattccggttttcgtcggcgctggtttaatcgggggaattgccgccgttctatcaaacatgatggtcgctggatcccttggttcaaactggtctgaattcattaccatcttaaacgtcatcaaaaacggcgtcttcgcttatctcgcaatctatgttgggattaacagtgccacagaatttggtgcaactcctggtttaggtggtgtcattggtgctgttacacttctaagtggtgttgatcctaagttgccattacacaatatcttcaatggcgatcctttatctgcaggccaaggtgggattatcggtgtcatcttcgcagtttggattctctcattggttgaaaagaaattgcatcaatttattccagattcaattgatattattgtcacccctacaatttcattattattaattggggtcttcacaattttcatcgttatgccggtagccggtgtgatttcaaattcacttgtcggctcaattaattggattctgaatgtcgggggtgccttctctggtttcgcgctcggtgtactcttcttaccaatggtaatgttcgggctccatcaagtcctcacaccaatccatatcgaaatgatcaacaaaacaggttcaactttacttttacccatcttagcaatggctggtgctggccaagttggggccgcacttgccctttggattcgttgtcgtaagaataaagaactcacaaatatgattaaaggggcgcttcctgttggcttcctcggcattggcgaaccgttaatttacggtgttactttaccattagggaaaccattcatcactgcctgtatcggtggtgggattggcggtgccgtcattggtgcaatgggcggcgttggtgcgattgccatcggacctagtggcttagccttaattcctttaattacaaacggccatcaattcgcttatatcttaggcttgctcgcagcttatgccggtggctttgtcgcaacttatttctttggcattcccaaagatgctacaatggaaaaataacctttaaaggacgctgattttatggaaagcatacttttttcaattcaaaagaaactcccaactttaaccaaaacagaacagcggcttgctcaatacgtacttgcccatccagtacaagtaccgacaatgacaactagtgcgtttgcaaaagcggctaacgttagtgcagcgactgtcgctcgctttggtaaaacactctgtggtcaaggtggctttccagcactcaaattacgactttcatctgaagggaataccgatcaacggctcttcgatgaaattaatccgaccgatacaacaactgacttaaaaaataaactaacttttcgaattaaccaagcgattactgaaaccaatcatcggctcaagaatgacgcgctcgaagaatccgcaatgattctccactcgaaacaaaccattttcatttatgggcttggtgcttcaaacgttgccgctgaggatttacaacaaaaactactgcgcgttggtaaatctgtcattcaatcacttgatacgcatctactggcagcagcactaaccacacagaaaacacaggcagcacttatcttaatttctaactctggcgaaaaacaagagcctctgcaacttgctaaaattgcacaacaacttaatattccaattattgttttaactcataataatcaaagtcaaatcgcacagttagcaaccatcacgttacagcatgatgatagtactgaaaacagtcagctaagaagcgcggcaacgacttcattaattgcacagctttacgctgtcgacctactctattacagtttcttagaacaagatttcaccgctaatacgaaccaattagctgattcatcgaacgttatcagcgaatattttactaagtagaaggagtcatcattatgaaactattctcacgtaaacccaaagaactcgaattacacgctattgtagatggacccgtcatcccgctcaaacaagtaaccgacgccgttttttcaacaaaaatgatgggtgatggttttgcagtaaaccctagtgatagtcatatctactcaccagtggacggtattatctctagtgttttcccaacaaaacacgcacttgggattacaaccaaaacgggcgttgaattattactccaccttggcttggataccgttgaattaaacggtgcgccgttcaccattcacgttcaagaaggcgatccggtgacaacagaccagttattagttgaaatcgacttagctgcgcttgcttctgcgggtaaagaagcaaccagtatggtgattgtaaccaacatagacgatatcagcggtgttaatgcccccctaacaactagcggacaccacggtgaggttgcacaaatcattaacttataaaaataatatagaaaagccccgctcagatgagcggggcttttctatattatttggctaagactgttatttgattattataacatgcttgattatcaaactgcatcaatactttagtcgctagatcttgcgttgcaaaaactaatctttcaactggcgtatttgccacgttgtaagccatcatgtgtgaaaaataaacaaactgtaacatattactgtatgccgaagcatcgccttgtttcacaatttttttaacgaaaaaattaacgatatgatcgccaaaacgaacataacctggaatcgaaatcagttgtacgttggactgtttagcagcctacacacgattggccgcattatctggcgcgtaaatgaccgttgtccctgtcgtttggtctgttggttgcattgtaattaaagctgtttttgacattaatagatactcctcttaagtgatgataaggtccattgtaccagagattaccgtttattttagtaattctagaaaacggttctgccaaacgttttcgtaaaaggcaattgtctgttcagccgtcatataggcgttgtccgttgtagttgaaagaccagctaccatttggagttggtagcccaaatggtgggcaactttaatcgttgtatcgacgcagtatttggtctgggcaccacaaatttcaagcgatttgatttgcatttggctcaataacgtttgtaagtttgtctgccaaaatgaatccgcatgcgttttttgaacaaagattgccgttttaggcacattcaattctggcattatctaccaagtcgactgaccagcaattaaagtcttatcgttatgttggacaaaaataatcgggcgactttccgcctgataggcatcaattctggcattaacgcctttaattaattgattaagacgcgcaacaggctgctcacttttgcagacaccattttggagatcaatcactaataaacaatcggctaacttcagcattagtcccctctttcctttaaatcaaatcgagtatatcattatttaactaaacttcatattttgtctgacgatattaaaaggaagagatgcggattacccccacctcttctttttcaatgtctccgatgtttttcccgcttcttaatctggtgttgctgaaaacggctgtattgtatggccttcttttcggcatgttgttcagccctattagttgcatgttgtgctttacgttgacgacccatccgaatctttttgttgataccaacgaattgaataccaatgataactgacttggcaccctcaaccacttgcatttaaacaattccttcacatgattatcgctcaatcccccactttcccgccaaaagcgttatactatggataataaataaaaggagtgttttgacatgcaaaaaccaattaaagggtcatgtaccacggtcttagtcggcaaaaaagcttccatcgacggttcaaccatgatttctagaaatgatgatggccacgaagctttggatccacaacgctttgttgtggtcaatcctgaagaccaaccccggaattatcaagcggtgattagcggcgttcaaatccaattgcctgataacccaatgcgctatacctcaattcctaactcattattgacgaacgggatttggccagctgctgggattaacagtgaaaacatcacgatgtctgccacagaaacgattaccactaacccccggattcaagggcttgatccttttgtccctggtggcatcggtgaagaagatattgtgacattagtcttgccttacatccacagtgctcaagaaggggtcgaacgtttaggcgccctccttgaagaattcggcacatacgaaccaaacgggattgccttttctgacaaagacagtgtttggtggcttgaaacaatcggtggtcatcactgggctgctgttcgcatccctgatgatgcatacgtggttgcccctaaccggatgaacatcaatcatttcgactttgattcagccgacacgctttgctcagctgatttaaaagctttaattgatgataaccacttgaatccagactttgaaggctacaatctccgtcatattttcggcagtgcttcaatcaaagatacggtttataacaacccacgaacatggtacggtcaacaatacttcaatccagaaatcaaacaagatccaatggaccaagatttaccattcatctgccatgccaaccgcaagatttcaatcgaagacgtcaagttcgtcttgagcgctcactttgaaaatacagaatacgatccttacggtagcgcccctgaagatgttaaaactcgtttccggccaatcggaattaaccggaatcataacgtgcatattttacaagtgcgcaacaacgtgcctgctgaaattgccggtattcaatggttagcttatggtgccaatacgtttaacaccgtcgtgccattctacacgaatatcaacgacacaccagaatcatacaagaatgccacaggtatttttgacttgaacaatatgtactggttaagttgtacaaccgccttacttggcgatacagattacgacttctacgttgatatgcgtaacaccttcgaactcgaagcaatgagtgcctatcacgtgatccaaaacgaaaccgacaaggccttcgctgatcaaaaagacgctgcagccttcttggaagccgctaataacaaactagctagcgaatcacttaaacgccaaacagccctacttggccaaatggtgatttcaggctcagaacacatgaaattacgctataacttgaacgactaataattatttaattcaaaaaagagcgtctcagctattcgttagttgaaacgctcttttttgagttgtcctcttttttcagtagcgtataataaatactattactcaaaccacactaaggaggcatttatcttttgaaaccccaaaaattaaaactatcggattacttactcggctttggattcgtattattgatggtcggcattgccactgtcttgaacgatgttgagattattctacccgaaatcgcagccttaacaacggggctgtggatttatcacgaaccgggttggctcaatcaacccgccaagatattttggctgccatcgataaccgccatcgttgggtttggcattaatcggttgccgctcagttatgcagttaaaattagcttactactactcatcatgattgttttactttgtttatttcgctcaacactcgcaccatcgtttgcaacggggctgttaccgattatcgtcaacgccactgaactttcattcatcattgcaattttaggctttacgctcactttgatgttggtcgttagcctccgcaaattgcatctgcaacatccctatcatgccacgattaactatcgcgtcatgctggtttttctaatcattgcactcttatgggtgttagttgttagtttactcggccggccacagatggctgccattccgccggtacttgtcgtcttttttgaaattctacaaaaaccaatgtatccaggtaaaatggccatcaagcagatggttgcattaactggcgccgccacaatcggattcgtcgcttatagcttacttgattcacggttattggtaaccttaattgcactgccactagtttgggcattactctatctgctacaagtcagaattcccgccgcctacgccttccctttattggccattattctcccacaccaaatgtttcaaagtttgccgctcgtcactttactggcaactagttactttttgggggctgcttatttataccagcaatacattaagccgcgtctcatcagcagataacatgacggtttacgactaatgagggccaaccgtgggcggataatcaacattcgcaaactgctggtcaacgcggtcccgttttaattcaggattattaattgctcgaaaaactcgcgcattttaatcgtgaacggattccagaacgggtcgtgcatgctaaaggcgccggtgctaaaggttacttccaactcactaaggatatgagcgcctacacaaaggcagccattttcagtggtgctggtaagaaaacaccaatgattgcgcgcttctcacaagtagctggtgaagccggctatcccgatacttatcgtgatgtgcgtggatttgcccttaagttctataccgaagaaggcaactatgacattgttggtaataatacgcccgttttctttgttaatgatcctctgaaattccctgatttcattcactcccaaaaacgagatccacgaacacacgcgagaagccaagacatgcagtgggatttctggtcactttcacctgaatcagtccatcaggtgacgattttaatgagtgatcgcgggattcccgctagttatcggatgatgcatggctacggtagtcatacctttaaatgggtgaatgctgctggtgagcagttctgggtaaaataccacttcaagacaaaccaaggcgtccataacttaagtaacgaactggctgccgaattggctggtaaagatacagattatctacaaaatgatttattcgatgcgattgaaacaggcgaccatccaagttggaccgttgccgttcaacttgttccttatgaagctggtttaaactatccgcaagatatctttgatgtgacgaaggtcatttcacaaaaggattaccccttaatcgaaatcggtcaaatggtactcgatgaaaatccaaccaacaactttgaggatatcgaagaattggctttctcacctgctaacttagttcctgggattgaagcttcccctgacaaactcctccagggacggttgttcggttataaagatgctgaacgttaccgtctaggtgccaactatgaacaattacctgttaaccggccaaaagtgcccgtgcataattacgaacgcgacgggatcatggcaaaaaaccaagagacaggcgtcaactatgaacctaatagtgaagatggtccaaaagaagtcccatctgccaaaattcatggcgaccaacttagcggtcaaaccggtaactatccagccgatcccgattactattcagcagccgataagctttacaacttactaactgatgaagaacaagatcgactaatcgaaaacattcgcttaaatctcggccaagttacaaaacctgaaattcaaatccgcgaagtcaaacagttctaccaagcggatccagaatacggtcgccgagtcgcaacggcattaaatttagatttaaaccaatttgaacactaatctatacaaaaagaaggtatccggcccaccggataccttctttttatttatcttcttttggagaatcttgttttgctgcccattctttcttggtcatcaagtcagagacattcattttaatcttcgtcacgtttaaaccagtcatttgatgtactgatttagcgatgcgttcaattgtttgttcgaagatgtctggcgctgatttaccgtattccaagatggcatccaattcaatcgttacttcttggttatcaatatcagcgtcgacgccctttgtcggatcttcttggtctctgaaacgatcagctaattgactcatcatcccgcctgataattctaagacgccatcgatgtcatgcaccgtttggcccgcaattttttcaatcacaccatccgagaagttcaattctttttcgattttttcggtatgttgatccattgtcttatccatcattttatccattggtttgtttggtttatccatcgttttcatcatcctttactatttttattgaacgcgtttttcagaatcacttttctttggattactgccttgttgttgccattctttcttagtcataatgtcactgacatggctgttaacttcgacaacactcaaaccggtcattgattcgacagcttcagtcactgcagctgttaatcgttcgaaaacatcccgtgcattccggccgtattccaaaataatggtcatgtcgattgcgacctgtttttcgccaacttccacactgatgcccttcgttggatcactatcgtttctaaaacgatccgcaatatcactgaagaaattaccgttcatcgataataagccatcaatgttttgcgctgtcttaccagcaattttggcgattacagcatcttcaaaagtcaatttgctattggccatcacttcatctaaatgtgcttgttctaccattttgtcacacctccgttatttatcctgcttcaagacccggttaacttgtgatctaaatccttctaggtcttccttagaccctgttaaactagctgcaatgtagccgagtaaaccagcgatgataatcaagattaaactcataaatccaaaactaatccaaatggctgccaacactgccccaacaacaaagccccaataagaacgtctcatttgtctcacctcacatcactttttgcctgattacttagcggtgatagtttgacattcactgctttaatcggcatctcaaagattgtttgtaatgcttgctgtaccgtttctttaactgcccgtgcttgttgatcgagatcgttgcgatccactgcgaccgcttgaacgtcggcagtcacttttggatgtcggcctttaaacgtcgtatggactaacacttccttaacacggtgtttttcaataatagcttgtgtcactgttttttcaaccgctttgcgggaaagtgctagttcacctttatcggtcttgatgatcatttggcgttttttcggtggactgaataatgccaatagcagtaaatataagaaaattaagccgctaagcactcctaatccaagtccaaaattaccgacccattgttcgggtagccaactaagatgcataaattgcttattggattgttgtagtggatagattaatgtgataaaccacgctacctgacacaacccaagcaaactggctaaactgatcaccactttagttaatttattcatggtgtccgcccctttgtattaggattttctacgtgtgaataataatgaaacaacgaaaacgacaatcacggcaccgataatggatggaattaaggccatcccggcaagctgtggtccccagctgccaaacaatgattggcctagccaggcgccgactaacccaccgacgatattgccgatccaacctgcaggtaaatcacgacttgtcaatgcccccgcaatcaccccaattaaagcgccaataattaaaacccataaccaatgtaacataacaatcatcctttcttgtttccttaaaatatattgctggttctccataaatgtaacaaattcaaccagcatccgtaaaacaatacgcttatcaatattattaaattatcgtaaatgcacttgtttaattaattgattcgccaccggtaacgccgtaaatttgaccggtaatatagcttgctgcgttgcttgctaaaaaaacatatagcggtgctaattccgccggttggccggctctttctagcaatgtattctgcccaaacttaggcaaagccccttccagttgtccttgagccaactgcaacggtgtccaaatcggacctggtgcaaccccgttgacccgaatacctttatccgctaattgttgcgctagattgatcgtaaaattcttgattgctgcttttgttgctgcataatctaacaaatgcggactcggattaaaggcttgcactgaagtggtcgtcagaatactgccgccagccggtaattgaggcaatgctgcttgcacaagcgcatacatcgcaaccacattaacgttaaaactatcttgaacttgttctattggtaattcggtaattgatggatgcgcaatttgttgagctgcgtttaagactaatgtgtcaagtgtgccaatttgctgctgcgcggtttccactacttggctagcaatctgtggtttccgaaaatcagctgggatcaatgcgattttacgccctgcatctcgcaccaattgagccacttcttgtgcatccacttcttcacctggcaaatattgcaatgcaatgtctgctccttctcgggcaaacgcaattgcaactgcgcgaccgataccagaatctcctccggtaatcagcactttacgatctagtaaccgttgtgcaccatggtagtgttcttcgccacaatctggcttgggatgcatttgatcttgcaatgccggactagcttgttcttgttcttgaaatggctctgtccgataaagtgttcgcggatcttttaaatctggtttacccatcttcttgttccctcttttccaattaatctagatacactgcttttaaatgttcaatgtcctgcgttgttaatcctaaggcctgttgtaaataggcttgagttgaaccataatcctcattgattatgcgctcagctgtgcttaagtaggactgatcaacactcatcaatgcatgcatactttttaaaaagccgcttgaggcatctttttgacgtagcgtcttaatgcgggctgcaacgtgttccctagatgctgtattcgataatagataatcatattggatcacatcttcaggtgccccgagtgcatttaataaataataagccgccattccggtacggtctttgccacctgtacagtgaaataaaactgcttgttgcggatcggcttcagtcaataatcgttcgaagaattggcgatacattccgattgaatagggatcttgcaccatttctcgatagacttggcgcatttgttgctgcccaccaagcggattattggtgtagcgctcataaagttccgcttcactcgccgtactttgcgtcgcatcttctttaaaaattggcaacgattcgtaagatgccgtcgtaatctttttatctggcgcttttttgcgctccattggtgaacgaaaatccacgacataggtgatatggtagctttccaagagcaccaattctctcttactaagattcgccagattccccgttctgaataatcgatgcggtttaatcgagcgaccatccagtgtttgatagccacctagttctctgaaattgtagccatttttaattggtaatatgcgcgaaaccatcgactcatcctctctaatcaaccactttggctgctaggatcattgattatcatccaatttttgaagacacctttttaccgtcttgttactaaaaacacgaccacgatgatcaaattccaatggcccccagctctcaccgacgagggcctcaccgttattctctcttaaaattgcttcctccaaatcagtcataccttctagaaaacactttagattggctgattctttcttaatcaccaagcacaattctggggtcttgactgtactacgacctaacctaactttcctaattcggacttctttttgcataagcaaccttcctttcatgaaatctttaataacgctacaccatcaatataaaacaatcacatttattgatgcaacttttatgattacgttttgttattgttagcataatcatttacctttacaaagattgttgaatttgtttaaataaagacacaacacctaaaaggagatggttattatcaacgctattaatatcatgtttgccgcagatgaaaactatggtgatcaacttttaatcgccgtaaagtcggttctaacccatatttcgcccaaaactactattaatttttttattctcgataatgaactcactccgcaaacgaaacacgctgtttccaagcgcgtcccacgccccaatcaagttgagtttattgcacttaataagcagctttttgaaaactgtcctgaaagcaaccatatcaacaaaacggcttactaccgcattttagcgccaactcttttgttgcgaaaaaaaatcgaacgtgtcttatatttagatgtcgatatcctcgtacaaactgatctcacgccgctatacaatacgcctttgggcacaaatatcgtgggtgccgtgattgatcctggacaagcactcacactgcgacggctcggcatcaccccaccacaatcgaataacatctacttcaattcaggggtcatgctaattgatacggttcggtggaatcatgcatccatcacagagcggactttccacttcatcaatcatcatgcggatcgcttacaattccatgatcaagatgcgctaaatgccactttggttggtaaagtgaaactactccatcctaaatggaacgtacaaaactcattgctctttagaaaacatacgcctatcaacactgaatatgcccatttatttgatgaagcaatcgccaacccggcaattgttcacttcacaacacacgagaaaccttggaacactctaaaaagtcaccccttcttaaaccaatatcaaaaggaactcaaacaattacatgcgcaacaatccgatataatcaacattgtatcggctgtcaattccgatttcatcgaaacgctggcaattctatacgcctcaattcttaatcacaatgactcacatcgacactatgctttttacgtcttagaagaccacctcaccgcacgagataaagcagtcttacagcatgttgtggctcgatttgatgccgacttgacctttgcagaggtcaacgaatctttactggccaatactgttgaaagtgatcggatcttaaaaacggcgtactatcggattctaattcccgacgtgttccctcacctcgatcgtgcactctacatcgattgcgatgcgctatgcctcacagatttagcccggctatgggatatcgacttaggccaatccttcctcgctgcagtagaagatgctgggttccacgaacgcttagaaaaaatggctatcgattaccaaagtccgcgttactttaactccggtgtgatgttactcaatctcaaaaaatggcgtcaacacaatattgtcagccgtgtactcgacttcatcaatcagcaccctgagaaattacgcttccacgatcaagatgctttaaatgcaattttgcatgatcggtggattcaccttcaccctatgtggaatgcccaaacaaacattttgatgaacaccatcacaccaccaactgaacacctcaaaaaacaattcttagaaacccaaaaagaacctgcgcttgttcacttctgtggtcacgaaaagccatggcatgcctcatcttcccatccattcacaccacaatatcgttactaccggcaacggttcttaaaacaaaaaaagcggctcgttcccttcgccaatcgccgttccctttctcaacaaggataactacaaaaaaagcgggtgcttagacaaatttatttttgtctaagcacccgcttttttaattgctaaaaattatctttttattgaccgactaagccatcatgaatcttatctaggttccacttcatcatcgtatagtaagtgtcaccttgcttccctctttgcgcgagtgagtctgtaaaaattttcgcataaattggtaacccagtttcctgagcaactttttccattgatttcggcgaaacagaactctcaacaaacagatgcttaacatctgaatctgcaatttttgcaagaaccgtcttcatctgttcaggtgtgccttgcgactcagtattaatttcccaaatgtaaaccggtgtgacctgataggccttaccaaaatacttaaaggcgccttctgaagtcaccaagacccgctgattagctggaatatcggcgaatttagtttgcgcatcagtatgcaatttgcgcaaacgtgcagtgtagcgatccgcatttttgcggtaatcatcagcgtgcgctggatctttggtctgcagcgctttcgtaatgttttcaacgtattgaataccgttcgccaaatccaaccatgcgtgtggatcgggttctgtttggttagttgtcaaatgttgcacctgaattcctttgctagcagcgaaaacatccttttcgaattgcttatgcgcgatcttaacaagttttctaaaccaaccattgccacccgtttcgagatttaacccgttatgaaaaatcacatccgcatcagtcgcttttgaaatatccgtcggttgcggttcatattcatgcgggtcagttccccgtttcacaatactgtaaagttcaatgtggtcttgaccaacattatggaccatatcttcaagaatcgaattcgtggtcactacacgtaatttagtctgctggttcgtttgttgttgtttagattgggcgcggtgctggatgaaaccatacacaccacccaccaaaccaaaaactgcaattaacgtcacaatcatttttttcatgctggtcgtcctcctttgcgccacttaaggaaaccttgcttaggcgcgcagatgaatgaaatggcaaagagcacggctgccatcagaacaatcgccggaccagatgcccagttcaatgtgtaactgaagtacaatccactgattgctgacacagcaccaatcccagccgataagaagagcatcgtcactaagcgatccgtccataaaaaggcggtggctgctggggtaatcaacatcgcaacgaccaaaataatcccgaccgtttgtagggctgaaaccgtgactaaggttagcaccaacattaaaccgtaatgtagcacctgcgtttttaacccatatgttttcgcataggtttcatcaaacgaggtaatcaataattctttgtagaagaatgagacgaataagatcactaagcctaagacaatcgccgtactcataatgtcgctatcactgacggcgagaatgttcccgaataaaatatgatgtaagttggttgcactttcggccatcgaaatcaggataaacccaagcgcataaaaggcactaaagacgaccccaatcgaagtatccgtcttaattttactatgtgttgcgacaaagccgattaagaccgccgctaaaataccaaatacagatgcgccaaccagcacattaattcccaacatgtacgccactgcgacacccggtaacaccgcatgtgaaatcgcgtcacccatcaacgacatcccgcgcaaaatgatgaaactcccgacaatgccagacatgatgccgaccattacggcggtcagcaacgcactctgcaagaattcataacgacccaacgcactaataaaagctggaatactcgtcattttgccacctcctgtgcatcaaacaagacagcggataagtccgcactaaaagcacgctcaatgttttgcgcattataaactttttcagttggtccataatcgacgatgccgtggttcatcaccactaaatcatcgaaatattgcgatactttattcaaatcgtgatgaatgacaatgattgttttacccgcatcacgccactgtttcatgattgccatgatcgcggtctcactctgtaaatcaatcccaacaaacggttcatctaaaataataatatccgcttcttggacgatggcgcgtgcaacgaaaactcgctgtaattgtccacctgacaactggccaatttggcgttgcgcaaattcgctgagcgatacttgttcaagtgccgcgcgactggcttgttttgcctttttacccggatcgcggaataagcctaacttgccatacgtgcccgttagcaccacgtcaaaaacgttaattggaaaatttaaatccaaatctttacgctgttcaacgtatgcgacttgcttctgaactgcgcgcattggtcgatcttgatataaaactgagccttgccgtgccttaaccaaccctaatattgctttaatcagagttgatttgcctgcaccgtttggtccaatgatgccagtgattttgcctgcgtcaaactgaacggcaacatcagtaaatactggtgtgtcatcgtaagcaacggtgaggttcttaactgataacataaagagcctccattcttttaggtaaacctaacttttctcactacagcatacatgattttaatggaattaacaaatattttagtttaggctaacttttcgggatttctgtggaacaatggcttaggatgtttcacgtaaaacataataaaagagtcgcgctatttttaaacagcacgactcttgttattaattagaaatcttcgtcagcatcctcatttgaaacagtgtattgataaatccccttttgaccagatgctaatattttatctgttaatgcatccaatcccaagttgtcacggttgatgaataattcaagtaacatcggtaaattaacacctgatacgagtcgatactgtggcgcatcccgaatgatatcaaccatcacattaaaaggtgtcccacctttaatatcagtcaatacaaaaatttcagatagtggttcaaatgatgcaaaacttctattaatttgttggcgtaaagcttctgtcgtttcccccatttcataagaaacaactgctaaatgcgcttgttgcccacaaatcatttcagcagcttgaactagacctctaccagcggcaccatgcgtacaaatcacaactccaatcatctctgttcctccagccattttaatatttcaattgacgatagtaacgtctaatttccattggatggcggttcaagtcttcgatgtgcacatcaattcgctcattgaccgcatgcaagataaatggtgataatgcaccgcggaattctggtgaaatccccggcatgtcgtaatctttcgcatcgataaccgtataattagcacagatttgtgggatgaagttagcaacgcgttcgctcaattgtcgttgactgtcttctgtcacgtaaattgtgactggtgtatcgcgttcaacaatttcgaacatcccgtggaagaattcttgcgcttcaattgattttgttctgagccaatgttgttcttcccaatagcacattgcatatgaatacgtagcaccccattggttaccagccccaacaaaataatgcatttcatcttcgtgatgtttcagtgcaaattctgtagcaaattcgtccgcatttttataaacagccacaacatcttttgcaaagttatcatccatttgtttgtagaattcgtcgtattgatcgaattcccctgctaaatacataaagcgatcacctaccatgaagaacttaagttgttcattcaatgggtatgaaattaaataatcacacatcgttgctaaatcggcatctgcacgatcaacaaacccaattacacgtgcaccaatttcattacatttcttgacagcttcgaccatttcttgcgtatttccagtaactgaagaaataatcacaaccgtgtcttttgtcactcggagattgccagttgttaagaacgaagctgcgttttcgtagaatgtttcaatttttgttctttctttcatgtgaacgaccgcttgcatggatgatgcataagtgccaccgatcccaatccaacaaatattactataaccctcatcattaatttgatcgacaattttattaatgtctgatctgagtgcaattccgccttctaagtttgccaataattcttttccgttaaatttcaacatctcaatttccttctttcaattttttatatttttgaatttgtaattggatcaaaatctggaaaagctgacacttttagattaatttgcttgcgcgctgatgcggtataagccaataagtgaattggaatagtcataaagagtggggctaacaactcatcagttggtaacgctaagccgaggtcgtcttgacgatcaacttggccattcgtaattcggacaaccttcgccacttttccggttaaaaatttttgtaacttagcgactcgctcttgtaacttcccgtttggttcaatgaaaatcacatgatcacttgcgtggagtccaatataagggccgtgcatatactcttcaacttccttaccgagtgcggtaatacgcactgtttctgtaatcttagtttcaccttcacgggccacaccgtatgtgccaccataaccaacaaagattacgcgttgtactgtatcaaacacatcgctataatgcgctacccattctttagcagcatcaatgatgcgtggtaggtcagtcacaatgttttcaatcgctgccaaattcgtttgataactcgcttgatcctgtttacccaattcaagcgccaacaacattaatgtcaaaatcgtggcactatagccagcggtcacatagggcatctcttcaattggcatccctagtggaatcacatgctgacttagcttggcaatcggactgttttcatcaccagtgatggtataaatccggccgttgattgcttgaacccgtttgaccatctcaatcgttgagtagctatgcccaccctgggaaatggcgatatacaacgtatccggttgcaggtgcaacatatagttcgccgtaaaagatggctcctcgacaaaaacaggaatgcccaattgctggctcatataaggctgtgccgcaaacgccgcatttgaactcgatccagttgcaaaaatcacaacatttttatatgccgttgatttgtcattcagtaacgtacgcaatatcgtttgccgattggctaatatatcagcatagattttcggttctgcttcaatgtaatgcaacatatcctgcatgcttgctgcctcctacttcagtagacctgtgtaagcaccaaagattccaattactgcaattaataatagaatccagtgtgctttcaagccttttttatctaaccagaaaataaagagcgtaaagagtaatggcaagatgcctggtacaatcccatcaaaaatactttgaacagttggcgcacctttacccgcaccaatcgtcaatggcatcttcagcgtcaccattgtcgccaccatcgatccaacaacgcccagccctaagacggaagcgccaaaggagagtttatccattaaacccgttttttgaactttttcgatgaagcccgcaccgatattgtagccaatgaataacccgtaataccgtgctaaaacagccggaatattgaagattaacaggaataacagcggccctagcagattcccttgaagcgctaaggaagtcccaattccggtcgcaattacccgcaacgtcccccagaagaaggaatcccctaagccacttagcggacccattaacgcaatcttgatattgttaattgcatctgtgtcaaaattttcatctaatgccgcttgttcttccattgctaccgaaatccctaatggaaatgtagaaagccacggcgttacattataaaattccaaatgtcgtttataggcgctcgttaatttttctttactgcctttatagattttatttaacgctggtgtcattgcaaacgagtagcctaaatttgattgtcgttcataattccaggcccattccatcgtgaaggagcgccagaaaaccttcatcaaatcttttttcgagattaaactagaattcttcatcttcataatcgatgcctccattcgttgtacttgcagcaactgtctcgcctttatgtccattattgaaagctgagtagccagttaataccaatgcaagacaagccccaaagatggcaaccccagtaacagggactttcatataaaccgctaaggcaaatcctaatacaaagtaaattgcattgtgtttattgaccattaatttcaacaataacgcaaacccataagctggtaataagccggtcgcaattcctaaaccatcgatgacaaattttggaataaccgctaatgatgacttaattactggactcccaacgatgaaagaaattgcaacgattaagccgattggtaaattgattgagaagaacccaccgaacaattgcatccgatccatgccctttgaattaccctcggccgcgtatttatctgccttatgaacaaagtatggcagaacaaagatgaagcacagattcttaataactagcactaacgatgcaatcggaatgcccaatgttaacgcaacggctgtactcttaccggcaccaatggcaaaggccgttcctaaaatactacctgaaataatttctggtggaatcgaagccccgattgaaaatgaccccacaaaggccagttctaaggttgcccccatgataattccggttttcatatcacccataattaatccagcaatggtacacgtcacaagtggtcgcgataacattgatgatccaaataaatattcagcattcgccaacatcgctgttaacgctaataatatggcaatcaatatatggttcatgagtttatcctccttttattctggtagtatcattttcttttcattcggtacttgttggataaagacgtctacaccagatttagaaagcgcttttaattgatcgacttctaaatcggttaagttaaccgccttagaataattcttcgttccttctcgttgttttgtgcccccaacgtttaacaatgtaatcttatcgcccgttcctttgattaatttctccgcatccgctactgattcaacaacaattaacaacttatatttatcggttgcgccagaattaatagcactaatactgtcatcaattgatttcatcactaacttcgcttgttctggcttcgccaagcgaattgctgatttacgaaagtcatcccccgccacactatcattagccactaaaatcgtattaacatctaattcgttaaaccaagaaactgcaacctgtccatgtaataaacggtgatcaattcttaaaaattctatcatgtgaagtcccccttaattaaaatcaatattaaattctgttgtatcagctggttcatagcgattcgaaatcccaatcactttatgattttcagcgtaatactgactgctcaatttaaagagcaacgcatcttcttctagatctaaatatttagcatgcgttgatgccatgctgacgagctgtaaatcttgctgcattccgtagaaattttccttagccgaattgacaagttcgatagtattgaccatctggatatccgcaagactcaaagtcggatataactgctgcggtaaaataatcgtttcgtaaacctgattctttttttcttgataaacatgtttgatggtatacaacaacgcgttgtcactgatatcaaataattccccataatatttatccgctttgcgaagatgaaattctttaatctgttttgctgcgttgcctaagttattattcttcatcacccccgtcatttctaaaatattttgcgaagaaatctggggtttaacgtatacccctacaccgtttttcttgataattagttctttagcaactaaattatctaaggctttccgaattgttgtccgacttgcaccaaataattgctgtaattcagcttcacttggcatcaacatcccacttttaaattcgctacgctgaatgcgagtttcgatttcgtctgaaatggtttcaaataagtattgtttcatcacaaatcaccatcctcacgataatcaaaaatatttttcgcatctaatcggtaacgaatttgatacccaatcagatactggacactatattcaaccggctcatcatcatgatcgtaagccaagcttgttacaatatataatggtgtcttctctggtatttctaatatgatagcctgtttcttatcggcatatcctgctttaatcgtttcatgcccgtagcctaagaccaccccatattgatccttcagtgtttgataaagggaccgattctgaaaagagatctgctcaatttctggaaagcgttcttgacttaaaaaagctaattcgtacgaaatgggtttcccattaatcattcgtttccgcggtagttcaaatacatgatctgccttcaaaaatcgaacaacatcttcttcgactggttcttcggtttgtgagacctcggtttgaatttcgtctggatttaactccgttgacattgaactcattgccagcatgttaatcacatgcttattgttaactgtcattcccacacgtggctttttttcaattagtccttcattttggaggactgataacgagcgccgcattgctgttcgactgataccatatcgctcagccaattctctttccgaaagattagcgaaggctcctttttggatatcgtatcgtaatcgttcctcacccaatgttgcaggtgagatttctttatattccaaagcgatccttcctttcaaattttaaagattaataactcttacaacctaattcactaaattaaaagatatagttttttatatttttaataccaaagtcattgtaagcgcttttttactttgtgtcaatcgttttgaaaaggtttttttaattggcatccattagttgattttgaatattggaaaatgacgttctagataaccagtgcattttaaagtttctaataatttattctcattattgcacatcaaatttaatgaatatatttcgtaattggcttaaaaacccgttaaatcggctttaataaggatttttaaagaactacttctctttaacaactacatgcaacagatttgcatatcgataaaaaacttgctaatattaactattatcagtaatgttgttaaatatgtatattaataaccattaattcaaaaacaatattaaccgtagattgtcggccatcactcgtcacataaaggagcgcgagacagttcttaaccgaataatgctaaaaatagtttctgttaggagtgctacctatgaaagatttctttttatccactaagtcaattacgttaatccgtatactagatcatattatccaagccaatgaagcacccatgcttcgggatattatgtatcatttctcactttctaaattaactgcaatttgctacttaaaaaagttgcaactagaccttgctgaattagacgccaatattcagctaacaacagtcaataaccgctatgaactcgattatcctgaaggaatgtcttctaacgcgattctttttgaacttcggttcgcttacattattcgaacaaccagctttcaagtgatggacgcgctttttaaacatcatttattagtaaccttttttactcagaaaaagtgagtcctttattttgaaaccgactatcgatcctagcactttttaattcgatcgcaaaaataatctctttttcctattcttctttggataaactctcaacatagcctggtacttgtttttgataggcctctgctatatcactaaaacgatactgagttcggtataccttgagccggttactcgtgattcacaattcttcactagtcggtagcgtaaaaattgcggctcgccccaaatcgagttcactgactttcggcgcttcggggtcggtgccaaaataccagacattcggtatcccatcaagcgtgacaaaattaatctgtcgactagccggttgtcccaggttgttcgctgtactcagcaccattgtattaaactgcttaacatatttacgaaactcgcttaagttattttgatacagctctgaactaaccggctgactatcaatataagcaatcgcatcatcaatcgtttctaatgccgggttagcctctaaataataaagaatctgtggaataatgtgggatatttctcgttgataataataaaactgaaaccagcgattagatactgataaggcctctgtataacgcttaacaattcgccgccgatagcgttggacgatatattttaacggtcgatatttaatcaacttttgaaagaatagtaatatggtgcaaacgactaagttaatttaataggttatcgcttccataaggtcattcaaacaaaaaaagagccccgctttcgcgggactctttttcacagtttaacgctgtgcttcatcttcgtgtaacttacgtaaaagttcgtcgatatgttcaccataacgcactgaaccgtcttgttcaaaggtgatttctggaatcttgtacaacttaatccgttggccaagttcgctgcgaatcaatcctttagctttatctaagccagcttgtgtcttttcagcgtcacttgctaagccagataaaatgctgtaataaactttaacatgttgtaagtcaccactgagattaatatcagtgattgtgaccccttcaactcggggatcacgcactctttttaataaaatgtcatttatttcgcgttgaatttcttgttcaacccgaccaacacgatgtttcattgcttgtcctcctgtaaattaattatttaacaggtacttcttccatcacgtaggcttcaatttgatcatcaatcttaatatcattgtaatcttcgattgtcacaccacattcaaagccagttttgacttctttaacgtcatctttgaaacgtttcaagcttgaaagtttaccttcataaatcacgataccgtcacgaattaagcggacaccactatcacgttggataacgccagtgtcaacgatacaaccggcaattgtcccgatcttagaaacattgtatgtttcacgaacagttaattgacccgttactttttcttcgtaaactggttctaacatacccttcatagcagcttcgatttcttcgattgccttgtagatgattcggtgtaaacgaatatcaacttgttcagcatcggcttgaatcttagcttgtggtgttgggcgaacattgaacccgatgatgatggcgttacttgcagcagctaatgtgacgtcactttcgttaatcgcaccaacggcttcatgaataatattcacgcgcacgccttcgacttcaatcttccgtaaactaccagccaaggcttctgttgaaccttgtacgtcggctttgataataacgccaacttcttttaattcgccttgtttcattgtttcgaacaagttatctaatgtgacagggtttgaacggctacgttccttcaagagcgcacgtttagcacgttcttcaccagcagcacgagctgttttttcgtcttcaaagacaacgaaacgatcagctgcttgtggcacatcattcaacccagtaatttcaactggttctgatgggaagacttccttcacacgacgaccgcgatcatttgtcatgacacggacacgaccaaaggtattcccaacaacgattggatcaccaatcttcaatgtcccttgttggatcaagagtgatgcaacaggtcctttacccttatcaagacgggcttcgatcactgtcccaaccgctttttgatctgggttagccttcaattcaagcacgtcggcttcaagaagcaccatttcaagtaattcatcaatgttttcaccagtcttagctgagatcttaacaaagatggtatcgccaccccagtcttcaggaacaaggccgtaacccatcaattgttccatgacgtgatctgggtttgcgcctggtttatcaatcttattcaccgcaacgatgattggggctttagcagccttggcatggttgatggcttcgattgtttgtggcatcacaccgtcatcagcagcaacaactaagatgatgatatcagtgatatcagcaccacgcgcacgcatgttactgaaggccgcatgtccaggtgtatctaagaatgtgattaaacgatcgtttaacttcgtttggtaagcaccgatatgttgcgtaatcccaccggcttcaccatcagtcacgtgactgttacgtaagttatccaataaggttgtcttaccatgatcaacgtgacccatgattgtgacaactggtggacggctcacaaggttggcatcactcttagcttctgtttcaaatactgaatcgatatcagcaatatccacttccactttttgttctgcttcgatgccgtaatccgttgctaataattcgattgtatccttatcaagtgattggttcatgttaaccataatccctaacatgaataacttcttgataatttcagctggttcacggtgaatcttcttagcgatgtccgcaacgttcatgccttcagagtaaactaatacttctggtaatggccgttctttacgttgtggcatttccttcttagcagcattttgttcagctaattgttgcttacgggtcttcttacgtttcttattgaaacgttgttgattgttaccgtagctgttatacccgccgccacgtttcttatctggaccaaagttctttggcttgcttgctgtattgtttgatgctggtttagcagcactcaccgtattagcttgcattttttgttgcatttcttgtgccgaaactggccgactttggttcgagttgttattaggacggctgtttgtattgtttgctggacggccgttgttattgctgtttgcaggacgattatttgttgtcgttgggcgtgcgccggctggcttgttgccggctggacgactgctgttattaccgtttggtttagcagctggccgtgggcggttactttgttgacggcgtttcttttcgtctgcttcgcgttgttcacgttgttgttgaatgcgttcttgcgttctttgacgacgtgcattagcttgtgagatttgttcttgcaagctcaatggttggtttgacccagctggacgcgtattgccgtttgtccggttagccgcattattgttagggcgaccattattaggacgggcgttattgttgttaggacgaccattggcattgttgcggttttgaccatttgatgcttggccattccggttgccttgtgggcgttggttgtttgaacgaggtgctggtttgctgctagcttctggacgacgacggatagcggctttgttaatcttaatcttaccgttatctgttttttcgcttgcctttggtgcagcaggtgctgcggctggcttgctgtcagttgtcgttgcagctggttttgtttccttatggaagatggctctcaaagctttttcttgattgtcatcgatagttgccatgtgattttttagatcgtaaccttttttaacggcagtttctaaaagatctttgctggcaacgttaatttcttttgctaattcatagatacgttttttacccatatcttcacgctcctttattatcccagtagcgttatcatctttttggcaaacccggcatcaacaaccgcgatggtggctctatgtaatccaattgcttgggttagctgggccgcggtatacgcttttgtttccgggatttcgtagaaatgactcttatcagtcaatttcttctgtgtcagttggctaatgtctgagccgataaaaaccaatttcgctttttgctgctgaatggcttttaggacttgttcttcaccactgaccagttgccgtgctctcatgcaaatacctaagagttgtaataaacggtctggttgttcactcattttcgttctccaaataattctagccgagccttttgatgatcaacatattcgaataattctgtataaaatgattctgcaacgtcaatcccaaacgtcttttctaaaattttcttgctttgggcggtcttgattgcatcaggttctagtgaaacataagcgccacgacctgatttcttaccagttgggtcaatactaatctcaccttcggcagtctttacaatccgcaccatttcttttttaggcttcatttcttgcgaaataacgtcttttctcattggtacttttctttgtttcatcatgaacacctcacttattcttgtggttgttcttcagaatcaacagcagaatccgttgcttggtcttcgaagccttcaacagcttctgttgtttcttcttcaaaaccttcaacgactgcaccttcatcttgactatcgtcttcatcaacgaattcgacttcagattcaggtttgatgtcaatcttgtagcccgttagcttcgcagctaaccgtgcattttgaccttttttaccgattgccaatgacaattgataatcagggacgatgactgtacatgtatgttcgttatcaccgttaaattgaacagcgatgacttcggcaggattcaaggcattggcgatgtagtctgaaggatcttcttcccacttcacaatgtccatgttttcgccgtgtaattcattaacaactagttgaacccgttgtcccttaggcccaacacaggtgccgactgggtcgacgttggggtctgttgaacgaacagccatctttgtccgatcaccagcttcgcgagcgattgagacaatttcaacggtgccgtcataaatctctggaacttcttgttcgaataaacgtttcactaaatcagggtgtgtccgactaacaaagacttgtgggcctttagttgtattttccacttttgaaacgtaaaccttaatccgatcatgtgcttggtattcctcgtttggaatttggtcttgcttgcttaaaacagcttcgatcttgcctaagttgacatagatgaacttgttatcgcggcgttcaacgaccccttgcataatttcgttttcgtattggctgtattcattgtaaatgatacttctttcagcttcacgaacccgttgcataatcacttgtttagcagtttgggctgcaattcggccgaagtcttttggtgtgacttcaaaacgaattgtatcgcccacttcgtatgccttgttaattgccaaagcatcttggtagctcacttcaagccgtgaatcaaacacttcgtcagtgacttctttgacagcatagacgtggatgttacccttcttttgatcgaattcaacttccacgttttgtgcttgaccgtaattccgcttataagcagaaacaagtgctgcttcaagggcttcaataacaatctcttttttaacgcctttttcttgttctagcgcatcaagtgcacctaacatttccttgctcatgtaactagcctacctttactaaaattcaattgctaagcgagctttggcaatttccttacgattaaacgttacttctttttgacgcgttttaattttaatcactaaagttaaagtgtcatcatcaagggcttttagtgtaccttgatagattttctcgccatcaacagcttggtataacgagatatgaatgtattcgccaagtgctttttggaaatcggcttccttctttaaaggacgctctgcaccaggtgatgaaacatctaagaaataagcctgcggaattggatccgggtcgattgaatccagtttctcacttaacgcatcgtttactaaggcacaatcttcaaggtcaatgccatttggtttgtcaatgaagacgcgcagataccaactgctaccttctttaacaaattcaatgtccactaattcaaaatggtgttgatcaagaatcggcacgatcagatcgtgaactgtttccacaacggtactcaaatgattccctccaattcatttttatatttcagattagacgtgctccaataaaaagagtgagcatttctgctcactcgctctgaagtatctaattactgataacaatataccatatttttcatgaaaatacaaacaaccgctttaattttcagtggttgcgacgctattttgcgtcttacccgtcgtcaagatttcatggaagttttcaaaactaatttcgaccatgttcttgagagcttcatcagtattcgaaccaacgtgtggtgtcaacaagacgcgggggtataaatcaatcaattcttgagtggttgcatctggaacaggttggtctgctgggaattgcttgaagaagatttcgccttcagctggtaacacgtcagcggcgaatgcaccaagttgatcagctttcaaagcatcgataatcgcacggttatcttgcaattgaccgcgggctgtattcaccaagattgcatcgttcttcatctttgcgattaagtctgcattgatgaattggtcgttttgaccagcgaagtatggaatgtgcaagctgacaatgtcactttgggctaataattcatccaagctgacaaaatcaagcacttccttagcgatttctgatggatataagtcgtaacccacaaccttggcacctaagcctttgtataacttcgcttcggtgtagccaatcttgccagtcccgataatcccaaccgtacagttgcggacttctttactgaacatcacagggctcacacggaaatcatgatgggctgtccgattcgttgtgtaagtggtgtgacgcaacaatgacatccctagcgtcaatgccaattcagcaatcgcgtttggcgagtagactggcacgcgagcaacttccatgttgtacttgcctgctgcggccaaatcgatatgaccgtaaccgactgtccgggtaaacacgtaacgaatcccgtattcattcaacttcgctaagttttgcgcatcagcggtacagttggcacgtaacaagaccgcgtcatgccccttagccgtttcgatattgtcgtgcgtcaataagtcttcaattaacgttaaatcataatcgtagttgttatatttattgaacgtcgccacttcattcggacgaacgccgtaacaagcaattttaaacatttaatttccctcttcctagaaaatcccgatttggttaatcacttctaaaatcactaaccagactggcgtcatcacaacagctaagaccgttgatagtaatgacgcgttcgatgctaagaccgcatccttgtcaaaactaatcgcgtaagcagcggcgaccgttgccgttggcgttgccatcatgatgacaatcgttgccaaactgatatagctaactggtaaaatgtgggtcattgttaagatggccaataacaggatgtttaaagcaggtactaaaatcactttgttaatactataaatccatgatgtcttgtccgaagcagcttctttgaagctgatttcgccaagcgttgtcccaattgctaaccaagctaatggtgaacataaaccagctaagtacgtcattggtttgaacaaccatggcgctgtttgatcaattcgtaagaaggccactgaatgtccagcaaccgccacttgtggtaatgcgccttggattaaccagatgattaaccccgcaaatgtggcgatcacgattggatttaagaacatgtttttcaagttcttcgattccatcttcaagccactcatcttgatgtacccatatgagtataagaacacgcgataaccaatgttgaaaattgagctatacataacccctttagctccgaaaactgctccaacaattggaatcccgaagaacgttgttgaaccaaagatggtcaacacgcgcaatgtatcttgttgatcacccttaaagcgtaagtataacggttttgaaattaaaattaaaataatatagatcaagaagccccaaactaaaacgttgatgccttcttttaaagtcttcccattaatatcttgcatgaatgagttgaatgccaaagctggtaaagcaaccgttaaaacgacttttgacagaatcttcccaaatttatccgtgaagatctcgcgtttgcggcagtagaatcctaataaaataataaacactgtcgacgtgatcgaactcacaatatccatgttcgtaaacgtcttcgttaaaatatcgccaatcctcatctgtactctcctctgttataacatttagtccgctgtattataacacggacaactggtatcgattataacaagaaagtaacggaaaagaaatagggcaaaagaaaaagagtgaaaaataacttcactctttctcagacctaaattttgtattcattttcattacatgctatatattaattatctaaactgccaaggaggccttctcatgcccagacaaagcatcttcaacatgtctctttccaaaatctaccccatgctcgtccaaaaagccgaacgcaaaaaccgcacccaagccgaagtcaatcagattatctgctggctaaccggctactcacaaagcgaactcgacgcccaactcgctaaagacatcccctaccaaacgttcttcgaggaagcaccacagatcaatcccaattgtaatctaattaccggcgtggtttgcggcgtccgcgttgaagccattgaagacccactgatgcaaaaaattcgctggctcgataagttggtggatgaattggcgaaggggaagacgatggagaagatactacgagaataactaaagcactcataaaaataaagccttagggattagcttgaaaaactaatccctaaggctttattcattacacatctaatcttttaaaaactgttgttgaactggtttaaacaaatttctaactgtcccaaagcgaggcggataatcattagagccaccagactcaatcactgttccgtctgcataggtcgcggttactgaccattgctcaccatcaatgatagactcgttaatataatagtcagcccacttcggaagttgcaatcttgaaagtcgattacgaacccgacggatagtatctgcatccaattgaaacctaatttcttcagggtgaataaattcatgcgttaccattctgccaatcatcaaaccagtttctaaatcgagactatatacttcatgcgggccaaaataaccatgacttgcgaattcaaatttatagctccatagtttaaagcattacatatcatattacttcaaaaaagacgttaggaagttttcttcactcttcttcattgcttctttaaacgcttgataacctacagcatcatctgtttcggcccgtacctcaggaatcttcaaacctaattttgcaatcatcaccgattcacggactgatacattatcctcataggttactccttgtctcagatgcaatggcgtaacgagttcgttcgtatgattaggatagatgtaatagccttgttgagcatcaaagcgtgccatatatgcaactaactgcaaataatcctggttaccgatatttccttgtggcttatactttgcatcagcaataatacgctgttcttggacgcgactgataaaatcaggatagattaatccgcctcggtcgaataagtattgtccacccacacgacttttattcattgggtgataaaaccacggtccaatcaattgattaatatactcttcccagagccacgcacagtcaaatagaataccttgtacttgttgactgccgccaccaattcgttgtttttcaaactgcaaaatcattaaacacaaccgttgtaaacttcgatattctctataataagcatgtcgaatcggattttctttatttttagtgataatcgttcgacgatcataatcttcataatgttttgttgcaacaactattgtagctacctcatcagatatcttgcctaacacagccttcccgtacgatttatttctgataaattcaatcgtatggcgaattagcaatgttacttcattctcatatgaaaattcacgttgattataagcaatatttccaataaatgggctattttgcctaatatgacgtgccacatcaattgttccacgtatattactgtcattatattgacgccgaccataagttttaaaaaggcctttgcgtagcgctttttttaaataaagtggcaataaaaaagccaataagtcaaaccccaatctatcccgctgtgcctccgtatttaacgccatcaagttaggcatatcaaacacccgctcaattagatactgaaaaaaataattgttcgccgatctttcaaaacgagactgaataatcagcctctcatcttgataaccaataaaaccagctaaattactggtttgataatcctcattaatacttcgaagaaccatttgatcggcagtaagatcgtcggcattggcaattatttctggaaaaataaaaaggtgatcattctttagttgcgttagcgtttgattaactaatttatttgtaagtttagggatatccttatagtgttcttttaattcacgttgattatccctagtcgttttcagcatcattattcaatcctgccattttattaggattatcatacgctctcttaaagttagtcatatatttcacctcatcatagagtccacgtacatagtcctgtaacaacggttccaaataatctgaccacaattgttcgaaggaaactgttgctagttttagaaagtatgctgcaccaatttgataattttcattcaactcgtccacatcaataattgcctgatttaatgcaaacatacggttggtcgcttcggtttgcttatcccctaaagctgccaacatcccaatatgttcattagccttaacttcaataaagcggaatcgacggcgcgtcgcaaaatcaaaactatcaaccgatcgatcaatatcattcattgttccaataatataaacattctccggaatataaaacttctccatcggatcatcatgtaaattggtatattgcgtcgaaactgccccttcttcaccacgatatcccggatcaattgagaagaatagttcaccaaatattttagagatttcaccgcggttgatttcatcaataatgaaaacatagggtttaggcgccgtcagttgaacttcaacatactcttttagccccaaattatctttcatatattggacaattgcctttcgataattatcatgaccgcccttttcgacacccggtttaccttgataaatattgtaaagctgcgttttattataaaagcgactcttcccttgaatccaattaccaaccccgtactcgcctgggtaggttcttgtcgttagaccatttccttgttcattcagctcaatttgaaagtaaccacttcgagcattcggaatatttaaataaccgacctcctctaattttaaaatgagttgttcccaaactaatttaaaattatcagcaccgcctttttgagcctttcttgcgttcattacgaactctttaaatactccgttttgtaatttaaatcccatttccccatcatcagtggtaaccggacgaaggccttcaacaaaatcagtgtaatcataacttgggtgaaattgaacaaaaccaacttgttgcttctgttctaaggttaagtcagcgtatttttgaacagaaccattactaattaaactcgcagcaatgcccttagcaagatatgatttccccgttccaggggcgccccgtagaataatatttttagattctttcagtttttcctctaaattacctaacacatcattgtccccattccgtactggatagtttgtaaatgttgcataaaaatgagtaagtttctgattgggtatatctttcgaaaataaatctaaatcgtccacttggtatgcttcatttaattcagtatcgtgttgatcttgatgcacaataattcgtaacgtttcaattttctgctgtctgaaacttgcacggatattaacactcttacctactgccaaatcataattcaaatatggcaacttactatcgccttcaccgctaagtggtccatatgatcccgaattaaaaagatggatcatataatgaatattatcgatttccaactcatcaaaattaccggtatgtctaaatcgattcttttcaaaccccgatgcgcccactgtcgtactgcgtccttcttttgattgaatattcaaattcgcttgttcgacaaagcgacgtaataaccacttaaattgactcacattttcatcagtattaacgatacccggcaccttcacttcaaatttttatttatgattattttagcatagattgaaaatatgaaataatcgttttaaaaaaccgtaaaaaccttacgtttttatcgagcgtaaaagttatcgaatatcactagtttatttttctaaaaatgatatgcgaacactgcttatcaattgggaagagcgtaagttaggtgatttagctaatattgttcgtggagcaagcccaaggccaattcaagatccaaaatggtttgataaagatagtgatattggatggctcagaatttcagatgtaactgaacaggaggggagaatacgtcatcttgatcagcgtatctcaaaattgggccaggagaaaacaagagttttaattgagccacatctgctattaagtattgctgcaaccgttggaaaacctctggtgaattatgtcaaaacaggtgtacatgatggattcctaatatttttaaacccattatttgaaagagagtttatgttccagtggcttgacatgtttagacctaattggaaaaaatatgggcaaccaggtagccaagtaaacttgaactctgaactagttaggagccaagaaatacctattcctattcttgaggaacaagaaaaaattggttcattcttcaaacagatagatgacactatcgctcttcatcaacgtaagttggatttgctcaaggaacagaaaaaaggctacttgcaaaaaatgttccctaaaaatggtgcaaaagttcctgaattgcgatttgcggggtttgctgacgattgggaagagcgtaagttgggggacgtagctcccttacgtggcggttttgcgttcaaaagctctgaattcagaaacactggtgtaccaattgttagaatttcaaatattctttccagcggtgaggtaggtggagcttttgcatattatgatgaacaggataaggatgacaaatatattcttccagataaatcagcagtcttagctatgtcaggcgcaacaacaggtaaggtatctatactatctcaaacttctcatgacaaggtttatcaaaatcagcgagttggttattttcaatccgtagactgtatcgactatgactttatttccacaatcgtccgttcagaattattcatgatgcaacttgagtctgttctagtttcaggtgctcaaccaaatgtctcgtcaaaagaaattgattcgtttgactttatgattccaaaattagttcaagaacaacaaaaaatcggctcatttttcaaacagttagacaatactatcgctcttcatcagtctaaagtgggaaaactaaaagttttaaaacaagcctatctccaaaaactcttcccttaaacaaaattcgttaattcaagatattaaaacgactatttatttatactttgatagtgaccaaaattggtcactattttttataggggagtggttagttatgcggggaaaatatctttttcacgaatactttgaagaatggatggtgttatacaagcgcggcgcaattaagcaggttacttatgataaatatgaattaacgcaacggcagattaaaaatcttgcacctacgctattattgtcagacttagatcggcgagcctatcagcaattattaaacgattatgctgcgacgcatgaacatcaaacgacgatggattttcatcatcagttaaaatcggcaatctacgatgcacttgatgaaggttatttgaagaaagatccgacgcgtaaggcgattatcaaaggtgttgtccaaaggcgccataagatgaaatatcttaatcagggtgatttgcgccgactttttggtgtcttgaatctagaagacgaggttaactgggattacttcattctattactcgctaaaacagggttgcgtttcggtgaagcactaggactgacaccatcggactttgattttagaacccaacaactaacgattgataaaacatggaattacaagcattaccgcggcggctttcaatcaactaagaatcagtcgtcagttcgaaaaatttcattagactggcaaatcgcaactcaattcgcacatttaattaaagatttacccgaaaaggaaccaattttcatcgacagaacacgccgaacacataatgatacagcgaatcattatctagaacgtaaatgtaaacaagcgcatatccctgtcattagtgtgcatggtctcagacatacacacgcttcaattttgctatatgcgggtgtttcactagcatcagtggctaaaagacttggccatgccaatatgacaaccacgcaaaaaacgtatctgcatattattaaaaaactcgatagtaaagataatgacaaaataatgcagtgcttgatgacactgaactaagcaaaaaggccgcgaattttcgtggccttttttgaatttctctttaaggaaaaagtttttggagataggcttgttttaattgctgtagctgctcaattttgagttgttgaagtgaaagatcttgatctaatttttgaaagaactctccgattttttgttgctcttctaagtttttagagatgaaaaacattgtttctgatacttttttccagtctgaaggtggcattttcgttccagatgtatcatttgcagctttttggtatttattagtttgaattagattgtaaacaaagttcgaaatattattcgtggatctaaaaatccagaaatcaccaagtgctattcctttaaaatttggcattaaccaattctttaaatacggacgaagtttaccatataatatatcattaggttcaaattcaattccctttcttgtgtcaaattttttacttatatccttatttaatctgccttctccagcagaaatatcttcaaattctatcttaggcaatttattggaattagaacttttatttacgcgaattattatgttcttaaacttaatttgtccccaatcatctttaaaaccactaaatcttaattgtggaacaacttcatttttaacaggaaacatttgttgcaaatatccttgttttaactttttcagcagatcatgctttcgctgatgaagagcgatagtgtcgtctaactgtttgaaaaatgagccgattttttgttgctcttcaattctagggatacttatgatagcttctttgatatcactagaattaatactttcaaatgttgaacccgtgctatatctagtccaataaccgttagacttcattttcccaagattctgaaatataaactcattacctttgatagcagcaacacctcgaccgataaccacgtcataagctgttttgccaatatctccaaccggtgctcgaacactcaaaatgagatcgtttttttcagcttgtttagtgacttgagttgtccatactcttggaaaaacatgaccatttttcatgtcagcattaccttgaacaagaatatgatcattaggattgtcagtataattttctgaattaggagactgtcccatcactatcagaacttcgtcccccaacttacgctcttcccaatcgtcagtaaagcctttaaaccggagttctggttgctttttttgctctttcatttaatcagactcctttttcgttgatacgagctgtgcttccatttctgcaaattctttttccaattttgcaatttctaaatcgatagctgcaatttcttttttaacctcatcaatgtcgattggttcttcttcttcaaaagtgtctacataacgcggtatattaaggttaaagtcgttttctttgatttcatctacagttgcaacatgagcgtatttatcaacatctttcctactcttgtatgcagcgacaatcttatcaacatcgctatctcgcaagttattttgattcttagctttctcgaaatcactacttgcatcaatgaatagaacgtctttcacttggcggtttttcttaaaaacaagaattgtagttggaatacttgtaccataaaataagttagctggtaggccaatgacggcatctaaataatttttttcaattaacgtttgccgaatcttgccttcagccgcgcctcggaataacacaccatgtggcaagacaattgccattgtcccgtcgttgtttaaatgatagagactgtgcaatacgaatgcgaagtcagcttttgaagttggtgctagtttaccgtattcactaaaacgggggtcttttagtttcgtttcattattatcccattttgccgagtatggtgggttagcaaccactgcatcaaaactcctaggttgatcaaccccagcttcatcaggaccgtctggccaatcactttcaagtgtatcagcattgtttaaagtcatattgttaaatgacacatcgtgcatcattaaattcatgcgtgccaagttataagtcgtcgtatttaattcttgtccgtagaacttaatcgctcctgcttgagttgtttcgggtaattgattacgaactgttagcaataatgatccggagcccatggttggatcatatactgagaatgctgtattacttggtgcaacatccatcgtcactagtttagcaagaatcttgctgacttgatggggtgtatagaattcgccaccctttttcccggcactggccgcgaattgtccaattaagtattcataaatttcacctagaatatctttatcttcatcactcttatattcgatatcatcaactaatttgacaatattattcaaggatttagcacgtgccgtcgttgaactacctaagcgcgaatcaccgagattaatgtcgttaaagaccccgttgaaatcttgagcagcctcttgatttaagaccgcatttttattgaaattatcaaaaatcgtttgataatcacttggaataaccgtgctattttcaattcgttcatttaatgattgccacgtatcagctggcgcaatcgcataacctaaacttgacgaaatatcttcaagataatcagctaattcatctgccgttgcttgttcgacataagcttgattaattgtctgcccatcggcaacatcaatcacattattagaaactaaatattgttcctgatgttctgaaaggtaccgataaaacataaaggctaagatataattcttaaattcaccagcgtccatatttccccgtagttcattagccattgcccataatttcttagtgatgtcttgtaatgttgttatctcactcattagattcgttctcctttaattgcggatcttttaatgtattacatgtttatcagctgctaaataaattgcttcgcgtaatccgtttcggtacctgattttcgaaagtgcttggatatcagcatctaatgctaaattcttataactcaaacttgcttcagcaataatatctcgcaattggccagcatcatctaaatcttgttggccatattgatgcgtactaaatagttgtcgtaacccagcactcgtaatcacatctgtgatcccccactggtttcgaaattctaataaaatccgatcaatactaatttgattagcttcttgaataacttgctcactatcgtccaacttgacaggatatatcattgccatccctttaggtggatagtagccatcaaggatcgcttgtgtcgcgtttttaattttgtgcgcataattttggtcttctaagccatttgcaaattgatcaatatccttcttcgtcttctgagcagcctcaattttttcttcatgcatttcattcaagagtttttcaacgagttccgtcaagtaatcgtagttgacttgaacatctttgatgtgcgtcatctttaactcaatttgctgaacaggcactttatcccgcacactaatgtattgttttatttcattcgttaaaacagtggtcaattccttttcttgtgccggtgtcatccctaaagcacgaattaaatcgtccggcgtatcatagttaaatccactatcttcttcaccatcttgcggtgtatattgtttaagtttcgacataccgacgttgtattgtcgcaataattcaaacatctcgtctttttggcgttcacttggtggtaattgattaaaaccatccgttaaatcatccagttggccgacaatcccacgaacctcttgcaccatgtttttaaaatctttcgctaaaacaccagaatcgacgttttcctttttctgttctttttctgataaagtggctgaatccttgttggaataaatggctaatgctttattcattaatttttcattctggctcggccaccgataattaaccactcggccccaaggtttttctttcatatcagcgattcgatttgttcgagagtacgcttgaattagacctgccccttttaaagtacgatcaacatacaaggtattcatttctggcgcatcaaatccggttagtaattgatccacgacaatcactaaatctaggtagttcttgtcagttgcagttcgattaaggcgactcgtaacatcttgcgtatagccagaaacgtcatctaacccaaaacttgttccaaattgatgattataaaccttcatcgcatcatgtaaattctgattggtttcgaccatgccatctttattcgttgtattttgactaaatgtaattgcaactttcagcagttggccgccgttctttgcatgctcttcattcaccttttgaaattctttaaagtacatcatagccattggggtacttgccttaccaccaccaacatgggttgtaaataatgcattgtacttaccttcattggaacggttacgccaattcttaaaaatatcctggacaactaagcgaacatggtcctcattttcatcatagaaactaggcgcaatttcatcgtccatgtcttcttgcgataaattatcaattttatcttgaatctgacgctgttcccaatcgggatgttgttttttatagaagtctggcaaatattgtgttttcatactttccgtatcaatcgtcgtctcaaaatcaactttaaagcctagtacgtttcgatcggcaatagcttctttaatggtataagcatgcagtaattcgccaaaaatatcctcagttcgtaacccattagttgtttcatcaaacataggtgtacccgtataaccaacccatgcagattttttaaagctcttttgcaataattcaaaagcatccccgccagttgaccggtgtgcttcatcaacaataaagacaatgtgtttatcaggtgacttaaaactcttacgcttaaccagtgtttctagtttttggactgaggtaacaatgatattgttatccttgctctttaatttccggcttaagtcgttggtactctgtgtcccttgcacactgccagagcgactatcatcatccactgcaccatcaggatcatacgctttgtaattttcattcgtttgctttgttaaagcaattcggtcaacaacgaaaacaactttatcgactcccggcattcggctagcaagccatgctgttttaaaactggtgattgtcttacccgaacccgttgtatgccagatatagccaattttgtttagtcccatatcaaaatcaacttttttaagtttttgaataacgttttgtgttgcataaacttgataagggcgcatcactttaatcatttgtttgttcttagtaccatccaaaatcataaagttagttgccatttgatgagccattggaatacttagcattgaatccgcaaattcgcgccagttacggacaatcttgttatctgatttccgttgccaattaaacgcaaaatctttgttaaatttgtcagctgttgtattggccatatatttaacattattcggcgtaatcgccaccagaatctgtaatgttgaaaaaatgtcagtgtattgattttctaaaatatattgatgcatctgattaagtgcttcattaacatcatgtgaatctcgtttctcttcaatttgaataattggtaagccattgattaataatgttgtgtcaaaccgccgttcttgcttcccagttagtaatgctggccgttcaatttgattgacgacttgatagactgtattaccagcgccaatttgtttctgatcaaaaacggttaaaaacacatgccgaccatcatctaaatcaatttcaatctgagagacaccatttaacccatataaaaattgaccagcatcatacggtgtttttaaatctgaaatgattttcttcacctgattaaattccatgacacttagcggattatcgagtgtattttgattatgctgctctaaaatctgcttaaaattagcccatagttgttcagttgttctaatatcgtctcgatactgccacagcttagtcttcacaacataatcttttgctgtttcacgaatattacttttttgaaaatcatcctcagaaactgttattgtcccacttgtaatatatttaattaattctgattcgaaatttaattcgttcattcactagtcctttcgcaactgattcattgctatttttagttttaaatccgcactttgctttctaaaccagtttaatcgtatttggttgaaatacattcttccaattaatcgttgctcatctattggtggtagtttattaattctcaacgcttttagctgtgcaagtgtatatttaataaccatcgttccttgtaatgaacttacaagctgtcttttaatattgtgatcctgattcaacaagaaaactaaatagtgagtatccaaatcctgattagggattaatttaataaaattttgagtttgtagatagccaacatgcttttttccaacaacacttgcttctccagaaactaaattaaaaataatatcgccttctgataaaatcataactttatcaggggtccgaatttgacgtccctcattggacgatgtttctgactgaactaaatcagctttcaattcagattgcccataaatacaataactgggatcactttcattcattgaaacaaatagacgagattgtggagagccactcacaaattcaacaaacttactaagtttctccattaaatcctccttcaacacttatttaatatgcttagtatacgtcgaatcaaaagtttattcaacaaattttatgtaattttttaaaattgcataaaatgtgtgcaaaataaaaagccttcatacttctccgaaaatttattttcagtgaaagtatgaaggcttttttacatcatatcaaacaacgataactgattttcatcaggcaggtcattcaatacgttattttctgttaggtattcgatcagtgtcttggaaactttcccacggttggataagtcttctttagataagaatggcttttcttcgcgggcggaaacgatttgtttggcgacgttaccgcccagacttgggacggcacggaatggcgcaagcaaggtgtggtcgtcttggatcaagaagtcagatgaatctgatttttcgatgtcgaccatcttgatgttaatcccgcgttccaaacattcgttggcgatttcgagaaccgtcaacaaattcttttccttggtgctggcttccatccctttatcggtgatttccttcatgcgcgctttgacgccttctttaccttgggccatggccacgaggtcgaaatcttcggcacgcacactgaagtaagcacagtaatagataattgggaagtacaccttgaagtaggcaatccgcaacgccatcaaaatataggcggtcgcatgggccttggggaacatgtacttaatttttaggcaggaatcaatgtaccagtctggcacattttcgttgtcgcgcatggcttgttgccagtcatccggaatccctttacccttacgaacccgttccatgatgttaaacgacatactatcatccataccccagtgaattaaatccatcatgatgttatcacgacaaccgataacgtcttttagggtaacaacgcctttgttaatcagttcttcggcattacccaaccacacgtcggtcccatgagaaagaccagaaatttgcaataattctgagaacgtcgtggggtgcgtttcttcgagcattccgcggacaaaccgcgtcccgaattctggtacaccgagcgtgcccattttcgaattaatctgttctggcgttaccccgagtgaatcagtgccggagaacaaggccatcacaccaggatcatcggttggaatcgtcttgggatcaatccccgataaatcttgcagcatccggatcatggtcggatcatcatggcccaggatatcgagttttaagatattatcatggatcgaatggaaatcaaaatgggttgtcttccaggctgcatcttgatcgtcagctgggaattggattggtgtgaaatcatagatgtccatgtaatccggcacaacaatgattccggccggatgttgacccgtcgttcgtttaacgcctgttgagcctttggcaagacgatcgacttctgcgccgcggaaagtttgttcggtatcacgttcgtaggctttgacatagccgtaggcagttttatcagcaaccgtcccgatcgtcccagcgcggaacacgttattttccccgaacaagactttggtgtagttatgcgcaaccggttggtaatcaccggagaagttcaaatcgatatcgggcactttatccccatggaacccaaggaaggtttcaaatggaatatcatggccatctttatcaaggggtgtcccacattcaggacagtctttgtcggctaaatcgtaacccgaaccgacttcccctttggtataaaattcggagtagtgacaatttggacagcgataatgtggcggcaatggattaacttcggtaatcccggtcatcgttgcgactaaactcgacccaacggacccccgggaaccaaccaaatacccatccttaccgctcttatacacgagcttttgcgaaatcaggtaaataaccgagaacccgttcccgatgatactctttaattctttatcgagacgtgcttgcacgatttcggggagttcatccccatataaatcgtgcgcacgattcatcgttaaggtttgaatttcatcttcggcacccgccatcttcggcgtgtacaacttatctttaaccggtgtgatttcatcaatcatatcggcgatttggttcgggttcgtcaccacgagttcttgggcaatatcggcaccaagaaaatcgaacgctgtcaacatttcatcggttgatcggaaatgaacatccggtaattgtgaccggttcaatggattagccccacccattgagtgaatcaaaatcttacgatagattgaatcttctggattcaaataatgggtatccccagttgcaaccactggtttatccaattcagcaccgagtttgaccatgttgcgaatgatttcttcaagcgcccgattatcgcgaactagttcacgttctaataatggtgcgtaaacggcttttggcattacttcgaggtaatcgtaatacttcgcgcgatcgcgtgcttcttggtagcctttttgcatcatcgcttcgaagacttcaccgctggcacaagctgaaccgactagaataccttcacgtaaggcatccaagcgactctttggcaaacgcggcgtgcgataatagtattcggtcatcgatgctgaaaccagtttaaataagttcttcaacccagcttgggtttgcgccattaaaatcgcatgcgctggccgtgcttgtttatacgcatcgccaatcccaacgcgatcattcagttgattgacgttgaccatcccatacatctcggccgcttcggcttctaatttgtataacaaataaccggttgattcagcatcggcgttagcacgatgatggtgttccaagttaattttataccgcttggttaacgtatcgagtttatgatttttgtattctggatgaagcatccgagaaacttccaacgtatcgatgacgggattttcaatctgaccgaggtcgttacgaccatagccagcattgataaagcccatatcaaacgttacgttatgcccagctaagacggcgtcgcccgcgaattctttgaacaacgctaggacttcggcttctttcttagcaccgtgcaccatttcattggtgatactcgtcaattgcgttgtgaaagctgataacgggtgaccgggatcaataaattcatcgaacgagccaatcacttcgccatctttcattttgacagcggccaattcgataatcgaatcgtaaacggccgataatccggtcgtttccacatcgaaaatcacgtattcagcatggtcgagcgcttcatcgcgcaagttatacgcgactggcgtgccatcattgactaaattgacttcgacaccgtacaaaatcttaacgccgtttttcttacccgctgcataagcatctgggaaagcttgtaagttataatgatcggtcaccgcaatcgcggattggccccatttagcggcttgttgaacaaagtcgccaatcttgttggtcgcatccatttgtgacatattggtgtgcaagtgcagttcgacgcgcttgccattttcagcggtatcttggcgtttgggatggctaacttccaccaaatcattggcgttgaccacgagatcacgcatgaagttatcttcttgaacactcccacgtaccttgaaccacatgcctttatcgatggctgcgaagatactttcgtcgccgttatcccgggagaatttcttgaccgtaaatgatgatgagtaatctgtcatcttcaaaatcaagagctggcggccagagcgtaaaacgcggacttctttatcaaagacgaacccttcaatgacaacggaacgttcttcttcattgattgtaatcatctgacgagttggttcagcaggatttaagccgcggcccattgaaatcgggccatcgactggtttaccttctgattgacgtttttctttaagtgcttcatttttcttgatcgcttcggctgccgcttgtgcgcgggctgcatcttgttcagccttctttgcttgaaaatcttcgattgccttttgtgaggcggattcgtcaatcaagggttgaatcgcaaacttgggaaaaccaagccgttgataaccagcttggattgtcgtttgcgcttgatttaagaagaacgtcttcacgatgtcgttttcgacaactaaaaagacgttgcgaccatcgatatagggggtctctttttcacacaattcgtgcaacattgaagattgaatcccactatggttgatgacgtattcccaataagctgctaaaacgccgccgtccaattcagttgcatcggtggtaatttccactgaaacgcccgcaatcgctttgaatgctgcttctaaatactgttcaaacgttgtgtaaacagcatatggcaaaacggattcgaaatgtaatttaaacgtccaccgtttggatgtttcgtggacaacgacttgttctacttggccagttttgaagccaggataattcgcaacatccgcgggtaaattaatttgttctaataatttttgaaacagtgcggtttgatctaatgccacaaaagggcctcctcatattcagaaagttaaataaaaggggctaggacaaatatcattctgtctcagccctttttagatgtccgaacatttataatgtaaacgcgctttttgaaactgcctcttgcgcttaactacaatccgcgaacgatcgacgttgtcgctcattcacgaatttaagttaatgcttggagccaaacggtttcaaacgcactctattcctaaacgtgcttttcaagctaactttctgcgcttagcgctgggaatcaaattatcgactgcgtcgttaattcgcttccctgtgctaatgctcaaaagttgaccgagcttgaacgcactctattcagcttctgttgtctctgaagccaataggatacttaatgaattaatcaattcatccttcttcacttctagggtttcacccgtcttacgtaatttaacttcgacgatttcttctgctgcttttttaccaactgtgatgcggattggtaagccgattaagtcactgtcggcaaacttaacgccagcccgttctttacgatcatcaactaagactgagtaacctgcttcttcaagtaaattttcgatctgttcagctaataagacttggtcagcatctttgacattgaccggtacgacatgcaagtcataaggggcaatcgcgcttggccaaactaagccgttttcgtcagcttgttgttccgtaatcgctgataagaggcgactcacaccgattccgtaagaacccatgataattggtttcgcacggccattttcatctaagaaagtggcaccgaattgttcagtgtaacgtgtgcctagtttgaagatatgcccaatttcaatcccctttgtaaagtgcaagttcccttgaccatcaggtgatgtttcgccttcttgaacgaaacgtaggtctgaataatcagctacggtaaagtcgcgcttgctgttgacattcgtgaaatggtgatcggcttcattcgccccaaccacggcattcaccatggcttcgacactgtaatcagcaacgatttgtaagtcttctggcgcgttaactggtccgattgaacccattggtgcgttcattgttgctaagacttgttctggggttgccatttctaagaaatcagcatctaagaagttcttcaacttcacatcattaacttcaaaatcgccacgcactaagaccaagaccggttggtcgtcagcgataaagaggacactcttgatgatttgttgtgctgggacgtctaatttagcagccacttcttcaattgtgtgggcatcgccagtcgctactttttcaagctctaattgcacatcacttgagttttgcttaggacggacactcgttgccatttcaaggttggcagcataatcactttggtctgaataaacaatcgtatcttccccaatttcagcaatcgcagaaaattccattgaatccttaccacccatggcaccggcatccccaacgattgcgcggaagtctaacccacagcgttcaaaaatgttggtgtaagcttggtacatttggcggaaagttgtatccaaatcagtttcattggctgagaatgaataagcatcttgcatgatgaattcacggccgcgtaataaaccgtaacgtggacgatcttcgtcacgatacttcgtttggatttgatataacgttaatggtaattttttgtatgatttgatttcattgcgcaccaagtcagcgaaagtttcttcgtgtgttgggcctaagatgaagtcgcggccatgacggtccttgaacttgaataagttatcgccataagtttcgtaacgacctgattcttcccacaattcagcaggtaaaatccctggcatttgcatttgaacggcgtcaatcttgctcatttcatctttgatgatggcttggatgttttccaagacgcggaatgctaaaggtaagtaactgtaaacaccagcagatacttggtgaatatagccggcccgtaacatcatccgatggctcttagcctcggccgagttaggcacttcctttaaagttgggataaataattttgactgtttcataatctgttatgcctccaaaaataatctaaaagaaaaagcgttgaatatcgttccatgtaaccaagaccattaagacgaccatgatgccgaccccgacaagggtgacaatgccttctttttccggtgagatgggtttaccgcgaatcgcttcaatcacgttgatcacgagcttaccaccatcgagggctggaattggaatcaggttcataatccccaagttgacggataagaacgctaagaagtagacgagcattgtaaagccttgactcgcgaattgcgtcgtcattgaatacatgccgactggtccggctagtttattgagtgaaaaaccacccgttaagaatgacccgagaattttaaaaatctgggtcgcattcgcccatgattgggtgaagccatatttcaacttagcccccacgctatggttgagtccagctgtcacaccaatttggccgactttccccttttgcccctcgactttcaccgctttaggtgtgatttcgagtgacttagtttgctttgcccgtttaacctggacattcactggtttattcggatattttgcaatcaccgagctgaaatcagtaaacgtcgtgacttttttgccagcaactttcactaaccggtcatccattttaagcccggctttttgtgctggcgagtttggcatcactgtgccaacaatcgctttgttttgtgggacgccaccgtttaaaaaagcaaagagcgcaaacgccacaatcgcaaggataaagttgttgaacggtcctgcaaagttggtcaacatccgattgattaaactagccgactggaattgaacatccacgggtgcgatttgcacttccgttccgtctgattcaacaatcgttgcatcgtgactgaccgaataacgctttaattcggattcgtcaccactttcatagccttcaatccataattctttttgcaagtcagtttttgcaatttgaaatgggacaccgtttaacgtggttactttgtcacttgtattaattttttgaacagtttcttgttcgtctaacagcaaggttgcttgcgtgccggcttcgatttcagattcatcatccgccatccccgccatgcggacatagccgccaagtggtaaccaacgaatcgtataagtcgtgccatttttgcgcgttgcaaataattttggccccatgccaattgaaaattcacgcaccaaaataccagaacgtttcgccatgtaaaagtggccaaattcatgcaccactactaaaatgccaaatatgataataaacgcaataatcgccgccaatagagtacgactcccttctaaatgcgtatttcaatactctcatttgatatgaactgttatattatatcacgaattccttagaaacaagaaaagcgtttagcgcaaaccaaaaagttgcgctaaacgctagataatattgacttttaaaaacgtgctttttggttgcaacaacttccgcttaatctaaaaattcaaacaatcctaaaaccgggattattcgaatttttgtattaatgctcagttgctaaccgccacaaacgcactctaaatcatgccaaacaagtgtagtagcggtaagacaaacaacatgctgtcaaagcgatctaagatgccgccgtgacctggtaagattttacctgagtctttaacgccataatagcgtttgtaagctgattcgactaaatcgcctaattgaccggcaattgagaagatcaacgttaaacctaacatgacaggcattgaataagcttgtgggaagaagtttaaataaatagctgcgaccactaatgctgataatgtcccgccaattgaaccttcccaagttttattggggctgatagctggccacattttattcttaccaaacatccgtccgaatgtgtaggcaccgatatctgtcatccagatgaccaataagatatacatcacagtgtcaaaaccaccaatatttcgcgttgcggctaaataatggaagcctaagccgatatagagactggctaaggttgtgacacccatatcatcgaagttaacccggtttttcgtgaagactgtgatggctaataaaatggcaacgaagaagtagaataaatcaaattgtgacacacctgctggtaaccagttaaaggcgcctttgggtgaggctaaacttaacaccgctagtccggcgatggttgcatcaggtgagacaataattcgtttacgcatgatgaaaacttctgataaggcaacgagtgctaaaacggctgccgcgatatcaatgtaaataccaccaaagaaaatgatggggataaagatgattaaagcaattgttgctgtaatgacacgttgtttcataattgtatttcctcctatttaagaccgccaaaacgacgattacgtttttggtaagcgccgattgagcgttcaaacactgctggggtaaagtctggccagaattcatctacgaaaacaagttcgctgtaagcaatttgccagagtaagaagttcgaaattcgctcttcgccactcgtccgaatcaataattctgggtcagtatattcccctaaaaagccagtcatcaagtaatcactaatcaacgcatcgtcgattgcatcgacctcaattgtaccatttaccgcatctttagcaatctgcttaaccgcttgttggatttcgtcacgcgacccataattgagtgcaaagttcaaaatcatccctgtgttatcagccgtatcggccatcgcattgttagccgctttttgcgtcttttctggtaattcttgaatattacccatgactttcacacggacgttttcagcaatcaattccggcatgaacgtatcaaaaaaatcgaccggtaactgcatcaagaagttcacttcgtcatttggacgcttccagttttcagttgaaaaagcgtacaacgttaagactttaacacccattcgactggccgttttggtaatcgtcttaacgttttccattcctgctttatgcccagcgattcttggcattaagcgtttcttcgcccaccgaccgttaccatccatgatgatggcaacgtggttggggatattggtgggatctagttgttgtgcgtctgtttttttatttgtaaacaccacatactcctccagtttcaataactctcatatgattgtaccaaaaatcacaggaagtgactatttaaaatcaaccgattgtcaccggcattgtacaaactgaaccgcccattctgcactttttgagttcttcccagatgatttttatccacgattaagcctttaataccaacgattcccgccacaacgtactgttgccgctatcacattgaaatttattgttaaatattagtagattcctatagttattggcatgtaacaggttaaatatgataaactaatacataccttaaacagaaaaagggagtttattatgcgaaaaaccttcgaactctttcgacttgattggcgtcgaatcttaaaaagcccgatcgctcttctattaattattgccctcattatcattccatcgctctacgcgtggtttaatatctgggcgttatgggacccttatagtaaaacgcaagacttaaaagtcgctgtttactcagccgatcaaagtgttgtcattgctgacaaaaaagtcgagattggcgccgaactaattagccaattaaagaaaaacgacaaattaggctggcaatttacttcgagcaaaaaagaattagatgacggcgtaaaaacggggaaatactacgccgggatttacgtgcccaaaaacttctcaaaggatctcgttagtttcgtcgatggcaagattcaaaagccaaagatagtctactcatctaatgataagattaacgcgattgcgcctaaaattaccagcgcgggtgcaactacgcttcagtccaccatttcagaagaattcgtctcaaccgttggtaaaacattgatgagtaccctaaacaaggccgggattgatctcgatacaaatctccccgtcattaatcgtttctcgagcctcattctcaaaacagaccaacaaattccagaaattaaccaatacgcagaacaagtgcttaatctacaaaagaaactaccggaaatggaattaaagcttgcccaagccaacgagttcgcggcctttttaccacaagcaaatgccatggcgcaaaaagtagtcggcatcaatcaatacttaccacaagttgaagcagccggtcagctcgcaacgaaagttcaggctaagattccagaaatccaaagtgctggcaaacaagttgccacactcgattctgatttcgatggcatcgccaatactttaacgaacggcattaacgaagctcaaactggtttagatgtgttaaacaaaacacaaaaagtcttaccggacttaatgacttttagccaaacggcccaaggtgtcgcgggtcaattacaatcagacttaatccctaaactccaagctgctttaccggtcattcaaaaaacggtggatcaagggttagccattaccaatcaattggcaactaacatttcaactaatttaacggccgtcaatagtttgctgagtcaactcaaagaggatcccaataatgctgaactcaagcaagcgctcaaagaagcgctccagaacttatctgatcacaccgctaccttgcaaacccatgcgactcaacttgcgacaaccctccaaaacttgcaagacagctacaatcagtcagcagtggcgaatggtcaaccggaatcacatgcacttgatacaccgattaaacatttaaatacgttggcgacccaactcggcgtttttaaaggccaagttgatgaccttctcgcccattacgatgatttatcaattgacgatttgcaaaccaagattaatggtttgattcaatacgccgaccaagtcgaagacagcgtcgctaagattcaagcggcccatatcggtgacagcgtcaaaaatatgctcgaccgcttttcaacattaattgctagcggtaatgccgtcttaacacagcttaacggcgaagttttaccgaaactccccgcactcttattcaacacacaaaagacgctccaacaagccatcgactatctgcaaaaatatgctcagcagttaccagcgttgaaacaagaaattcatgacgcgaatacattattaaatggcaatatgggcacgattatctctggattaaacaccgcttctgacgtttaccagaatgattacccactactcaaaaataaactgcaactggcaaccagtttcatcaacaatgacttaccaggcatcgaaaacgacttaacaacgacgctcaacatggccaacgagaaattcccactcgttaaaaccgccttaaatgatgcgaccaacctcatcaacaatgattggccattcttacgtagcgggatccaaaaaggcgctgaggcgattcgcaaacaacaaaagacggtcgatctcaaagatctgattaaattgcttcgccgcgatgcaactaaggaaagtaatttcttagccaaaccggttgaactgaaagaaaaacacgtctacccgattaagacctatggctcagcaagtgcgccgttctacacagccctttgtctctgggttggtgcacttcttttgagtaacatcgtcttaaccaacttcgcgttagacgacaaacaaaagaatcagtacactaagaaacagcaatttattgctcgctggctaacctacatcgtcattggtatcgcccaagccgtgattgtgacgcttggtaatattttcttattgaaggcctacatcgttgataaactaccgctaatcttattagccgtcttcctgagcatggtcttcatgacaattgtttacgttctcgccgcgatgttcgggaacgttggtaaaggaattgcgatgattgtcttggtgctttccatctctggcggtggcgggaacttcccagttgtcctctccgatcaattcttccagtttattaaccccattttaccgttcaaatacggggtcaacctcttacgcgaaccaactggtgggatttacgcaccgaacctctggcataactttatcatcctagcgctctttgcggttgttttcttcctaattggcctcttcctgaaagatcgaatcaatccattctttgaaaaactccacaaagaagcgacgaagagtaaaattattcattaacgcaaaaaaagccccgccactgttgtggcggggctttttgcatccattagggattaaccttctgtgatttctttttctttgttcttggcgatttcgtcaatcttcttcgttgcttcattcgtcaatttttgaacttgttcttctaaatcatgcatttcatcttcactaatctcgcttgctttttcagcttttttcaagctgtccattgcatcacgacgtgcatttctgatggcaactttgccgatttcagcttctttaccaacttctttagcaatttccttccgacgttcaccagttaattgtggaattactaaacggattactgagccatcgttggctggtgaaatccctaaatcagctgtataaagagctttttcgatatcttcaagcgcacccttgtcataaggggtaatcaacaagacccgtgcttctgggactgtaattgcggcgatttggttaagtggtgtcattgcaccgtaatactcaacattcacgcggttgaccaagcttgcattcgcgcgaccagcacgaatttggcctaatgttctttgtaatgaagcttctgctttttccatgcttgcttttgcttcatctaaaattggatttgccatattattctcctccttcgatcgttgtcccgatgttggcaccttcaacaacttttttgatattgtttggttcgtttaagttgaagactaccaatgggatatcattgtccattgataaagtacttgcagttgaatccatcacttgcaagcctttgttgataatatctaaatgtgttaatgtgtcgaatttaacggcacttgaatcagtgttaggatcagcagagtaaacaccatcaacgttgttcttagccatcaagatcacatctgcatcaatttcagcagctcgtaatgcagccgttgtatctgttgagaagtaagggttccctgtcccaccagcaaaaatcacaacgcggcctttttctaaatgacgaacagccttccgacggatataaggttctgcgatttgacgcatttcaattgatgtttgcacacgcgttgggacaccaatgctctctaagttatcttgtaaagctaaagcattcatgaccgttgccatcatgcccatataatcggcttgcgcacgttccatgcccatttgttcaccagtcacaccacgccagatgttcccaccgccacagacaatggcaatttgaacccctaaatcgtgaactgatttgatttcgtttgcgactactttaacaatttcagggttaattccgaaaccttggtcgccagcaagtgcttcaccactcacttttaagacgatgcgtttgtattttgtatttgacatgattgatatccctccgttgattactaggctcattttaccatatttaataagttatttgggtatgcgattctgaattatcgtaaaactgcaaaaaaaaggagcgcaaattgcgttccctttttgaagcaaaataagcttatttgatttggcccatgacttcatcaacaaagttattttcttttttctcgatcccttcaccaactgtgaaacgaacgaaacctttaacgctaccgttcttagatgcaacaaattgtgcaacagtttgatctgagtctttgatgaaagcttggtcgttcaagctgatttctgacaagaacttgttaacacggccttcaacgatcttaggaatgatgttttctggtttgccttcgttctttgtttcttcagttaatacttcacgttcgtgagccaatgtttcagcaggaacatcttcacgagaaacgtattgagggttaacagctgaaacgtgcattgcaacgtcatgagctgcttcatcgtcagcaccttctaaagtaactaatgaagcgatttggccaccattgtgtaggtatgcgccaaagtgatcgccatcatttttttcaactaattcgaaacgacggaagctgatcttttcgccgataacagcagttaagttgattactgagctagcaattgtgccttcgcccattggtaatgcttctgcagctgccatgtcagctggtttgtttttagcgattgtttcagcaatatctttcaataaagctttgaattgatcgtttgaagcaacgaagtcagtttctgagttcacttcaacgattgcagcagtgttaccatcgatggcgatgcctgctaaaccttcagcagcaatgcggtcgctcttcttagcagcctttgccatccctttttcacgtaaagcatcgattgcttgagcaacgtcgccgttactttctacaagggcttttttagcgtccatgatcccaacgccagttttcttacgtaattccattacttgagcagctttaatttcagccataattcatacctccgacaatttatattcaatataattggtttaaaaaaagctgtcccacaagtcaggcagtatttgcgaaacctctaagacagcttatttgaatctactatttagcgtcagtgttagtatcgttgtcgccttcaactgcttcaacgatttcttccattgagtctgctgatttgttttctgcagcaaatgtagcttcttcaacatcatcttcaccttgacggccttcgatgatagcatcagccattttagctgtgattaaacgaacagcgcggatagcgtcatcgtttgatgggataataacatcaatatcatcaggatctgagttagtatcaaccatagcaacgactgggatatttaatttttgtgcttccttgatagcaatgcgttctttacgaggatcaacaacgaacattacgtctgggatgcgaggcatatcttcgataccgcctaagaatttttcaagtttttcttgttgtttcttcaacaaggcaacttctttcttaggtaaacgatcgaatgtaccatcttcgtccattgctttgatttctttaagacgtttgatccgtttttggattgtgtcccagttagtcaaagtcccacctaaccaacggtggtttacaaagtattggcctgcacgtactgattcttcagcaattgcatcttgtgcttgtttcttagtaccaacgaataagaatacaccttcgttagcagcttcttctttaacgaagtcataagcatcgtcaaccatgcgaactgtcttttgcaagtcgatgatgtagataccatttctttcagtaaagataaatttcttcatttttgggttccaacgacgtgtttggtgaccgaagtgaacacccgcttctaataattgtttcattgacaatacagccatgtcaacagacctccatatggtttttttcgaccactggtttcacttttttagagaacttgtcgccaagcacctctctagaaatcaaccagtgtgaattattttttggtattgaaataccgtttaaaagtatactaaaaataacaaggcgcgtcaacaagaacttacatgccgcccaattgtttctgataacgggttgcatcttgtggttggtggctcactgaggtaacgccactcactgtttcaaccgctcgatagcccgcttttagcgcgacttgctgactcgccacgttttcgtgtgcagcaatgatactcaactggtcaagttccaattcactggccgcgtattgttcaatggcggctagtgcgcgatgcatgacacctcgtccgcggaaagcttcatctaaccaatagccaacttcacccgcacgatccaagtcgtcaatattgtgaacatcaatcgtaccaactaactggtggtcatcccaaatcgttgccatccaaagttcctggtttgccatttgttgttgcgcatattttaaaaagccaagttcatcggccactgattcgatatcgcccacccatggtaaccaagtatcgagattgacgcgattttgatccactaactgaaataacgccggcgcatccgcttccgtcacaggttgtaaatgaatgtgttgatcgacaactaacttaggttgcatattggtctctccattctaaaattgagttcttgaaatgccatgttccattaaatattgttcttttttgcggcggggttgatgtttgaacgcatactctgctttaagcgccgccgatttatcactaaacgtttcaaaatataataaccgcactggtcggcgcaattttgtgtacttcgcacctttgccagcattgtgcgtggcaacgcgtttggtaacgtcggtcgtgaaccccccataaaaactatgatcggcgcagactaatacgtaaaaataataagccttctcagtcattgtcagccatgaataacttcgtgcgcatctctggtgtatagtggctgtcttggtcataaatcgtcagttccggaagcattcgtaagcccccttttttaccatctttgaccgcttcaattaacaccatattcgcttctttgcctgctttgggataaacaaaccggacgcgtttgggttccatgcgtgcggcgcgtagttcgtcacagatttctaagaaccgttcgggacggtggactaaataccctttaccattcatctttaacaggccactcatggtttgaaccacagtgcgtaagtccgttgcaatctcatgccgcgccagtgccagatgttgattgggatttttttgactattgggttcaaccttaaaatatggtggattacaggtcacaatatcgacgctgtccttatgaatcttagtgttaacgtctttcaaatccatattgagcattgtcacctggtcggttaagtcatttaattcaattgaccgttgtgccatgtcggccaaccgttcttgaagttcaacaccgataatttgaccatttgttttgggactcatgaataatccaaccgccccattgcctgcgcacaaatcgacaatcgtcccgcgttttggtaactgggcaaagtcggctaacaacaccgcatccatcgaataggaaaagacggatgggctttgaataatctgaatatctaagcgaaataattggtcaattcgctcatctgcttttaacatcgttctaccttcaacctcatttgtatttaggcatattataacaaagagtatcattatttggtataatgagcagatactagtcacgtttgaaaggaatctaaactatgtttttctcatttgcacgttttatcgtccgcattttagcctggttattgaatggcaatttgaaggtcgaaaataaagaagccctgcccgaagggacttatgttttagttggcccgcaccggacttggtgggatccaatcttcttcgcacttgctgctagtccccgaaagttcacgttcatggctaaagaagaactctttaaaaacccaattttacgcttcatcttaacccacgcaaacgcatttcctgtgaaccgaacaaatcctggcccatcggcgattaaaacgccagtaaaagcccttcgctcaaaagaactttcgttaatcatgttccccactggtagccgctattcaagcgaacttaaaggcggcgcggtcgtaattgccaagatggcgcgggtcccactcgtaccagcagtctaccaagggccattaaaattctctgatgttttaaaacggaaaaagattacgattcgttttggtgaaccaatcccaatcgatccgaaattaaaactcaacgaagagaacttagaagttgtcaatcatcaaatgcaagccgcatttgatcaaattgaccacgaaattaaccctgattttaaatatgaactacctgataaaaaataataacaaaaaactgctagatgatatcatctagcagtttttttagcgcgttaaattcttaaccgcattcgtcaccaatagataggccgtaactaatgccactgcaatccagccaaattgtgttggaatcgcttggaaatcaacggcttgtctgagcggtgtcaataccagaatacctccaattaacaaactgattaaactccccaagtaaacacgccaatttgcgcgatccttggacggtgatgctggtgtccgtaatacataaactactagcatctgcgtcaataaaccaacgacgaaccaactcgcttagaaagccccctgttgagctgatgtttgcaggccaaatccaaaccagagaatcgcaaacgttaaaatatcaaccattgagctcaacggtcctagaataaacgcactcttcagtaagcctttagttgcccactgtgttggttggcgcaattgatcttcagcaacccaatcccaaggtaaccagagttgtgcgacatcatacagtaaattctggacaagaatttgcagtgacaacattggtaaaaatggtaaacagatgctggcaaccagcacgctcaaaacatttcctagattagaagctaacgtaatccgaatgtacttatacatattgataaagactctccgtccttcaagcaccccgtgttctaaaacattcaaatctttttccagtaggattacatcgctagcatcctttgtgaggtctgcggcattatcaactgaaatcccgacatctgcttgtttcaaagctgtcgtatcattaatgccatcgcctatgaaaccgacgacttccccttgtgcttgtaataaacggattaaacgcgctttttgaagtggagccaatttggcaaataatgcttgctcggttaatagctcactgacttgtgcatccgttaacgtctctaacatctcaccagtggtcacagctagattctgaatgcccactttttgggcaacttgctgcgtcgttaaagcactgtcacccgttaaaattttgaccgccacttgatgagcttgtagttgttgaattgccgagatagctgattgttttggtgggtccaaaaagcccaaaaagccgtcgaaaatcaaaccttgattaccaacgtggtcaattgatgccgtctctgctaagtcatcttgataagcaaccgccagcatccgcatcccttgttgtgccaaacgatcatgcactgccactaggttctgcttttgcacttcagtcaacggctcaatctgatccgctaacctgacttgggaacacgttgctagcacttcttcaaaggccccttttggcactaattgattacctgcatggtttttgagccagaccgttagccgccgccgctcgaaattaaatggaatctcgcccaatttttaatatggaaagtcatcattggtttggtcttgttcatagtaatgaataatcgcttcatccagaaggttctgccagccggattgacccttggcgttcaaatatgctaatcgcaaaacttgcacatcccgctttcctaaaatatctgcatagtacatcaatttaatatgatcttccgtcaacgtccccgttttatccgtacataaaaccgacatcgccccgagattctgaatggcctttaactgctttacgatgacctgttgttgacttaaaacgacactgcctttcgccagattactattgacgatcatcggtaacatctccggtgtcaaaccaactgccactgcaatcgcaaagaaaaacgactgttgccaatctcccttagtcacaccattaatcacaaatacaaagggcaccaaaacgagcatcatgcgaattaataaccaactgatgtgttttaaccctgcattaaattgattcggtcgcgacttaggttcagtagtcacaattgcgctaaagcaagtcgcttgacccgtggcaatcactaacgcggtagcttgcccattgacaacggtgctgcccatcagcaataaactcgccatatccgccgcattcgttacgtcagttgcttgcgctgttatgcgtttgctcacgggttttgattcacccgtcaaagaagattgattaatttgtaaatcatggctcgccagaatttttaaatcagcattcaccaaatcccccgtctgcagctgcacaatatccccaggtaccagactttgtgcggcaacttcagttggttgaccctcaattacaacccggctggtctttgccaacatcgcttgtaaagcaatgctcgcttgctcggacttgcgctcttgcacgaatcgaatgctactagacacaacaatcatgattaacataactatcgcgccatcaatatctcgactgagccaggagatgatcattaagacagctaatacgccgataaacggatcttgcacgctctgccaactagctcgcaataacgaacgctgttgccgcttttgaatcgtattttccccataggtttgtaaccgtgctgttcgttgctgccgtgataaccccttcttgtcagtttcgaaatgttctaaactcgcttttggcgttaattgattaatctgattgagtgtcattttaattgtcttagccatcgtaatccctctcattcgcagctgatccgcataaaaaaggcatcctcaaagaaaggatgcctcacaagaaaaacaagccattccaatcgttgagctttagcactatatgacgtagaactttgttcagctacattagaaaaagccttcagggcagtttctgttgactcaattggcatctctcgatgtttctgagtagcagcgtttgttcatataggagcctcacctaacggattagcgatatcaatatatttatatatctatcataccaaatcgacttcaaaatacaattaaacagacttattgaagatattcatttaaaaattgcgcaactttattacgataggttgttggatctgtagccaaggcttcaccatgagctgcccccgaaaccacccagagttgtttaggtgcatgcgccgctttgtaatttgtatacaccattttggttggtacaaatttatcttgatcgccatggatcatgaagattggcaatttcgagttagctaaactcttagcagtatcgccatcattaaagttatagccggcgcgaacccgtgccatccaattcgttgtgtaaaataacgggaatttcggcaatccaaagagatcgtttagttggtatgcgagttcgtcagcgatgctattatacccacaatcttcaatcaccgctttcacctgcttaggtaattcttcacccgcggtaaacatgacggtcgcgccacccatgctgaccccgaaaagggcaatttgactatcctgtccgttggtagcgacaatttgttgggcccacttgacgtaatccaagcgatccgtccaaccatagccaatggcatcgccttccgattcacctgctgcacggtcatccggcgcgagaacgttgtagccaagatcgtgatacatgtgaatatagcgtgccatatcctcttttttacccatatagccgtgcgcaactaaaattgttttgttcgtaggttttgttgctggcacataaattgccgccaattttaaatcatctgtggcagattgttgatgccactttgattgtttaacattttttaaccaacgttgattgtcttgatagactttcgttggcttaccaccatttaaaaatgatttttgccccggtacaaatgcgtattgatacatatacatagtggcaccaaatagtgctaccaccactaagacaacaacgctaattaacgaccatttcagccagcgtcttttcttcatgtgctaaattcctcccgatttactccgcaataataatagtcgtgtttttttgaaactgcttattcttcactgccaccattttggagttgatacatttcataataacgtcctttttgagccactaagctatcatgattaccccgttcgacaatctgcccttgatctaaaaccaagattaattcagcatcgcgaatcgtcgatagacggtgcgcgatggcaatacttgtacgtccttgacgtaaccgagcgagaccagtttgaatcatcgattccgtttccgtatcgatattagccgtcgcttcgtccaagaccaagattttaggatttgtaaccaatgttcgcgcaaacgaaattaattggcgttgtccacttgaaaattgggcgccaccttcaattacacgagcatgatattgaccagataattgttcgataaagtcatcagcttgcacgaattcagccgctgcgcgaatttgggcatctgtaatctcttgattaaataatcgaatatttgatgcgacatcaccataaaacatgaatgcatcttgtagaacaagccccatcttgcggcgcagttctgctgtctgaaaactccgaatatcatgtccgtcgattagaatctgaccttcataaaattcatagaaccgcatcatgacattaataattgaacttttcccagaaccggtatgcccaactaaggcgacagtttgtccaggttcaacaacaaatgagatgtcatgcaaaatttcatttttcccatcgtatgaaaacgaaacatgcttgaattcgacgcgaccctcagtaatttcatttgcagcatcggcattttgagctggcgcatattcttcttgatcgagaattctgaaaattcggcgaccagcgaccattccatcttgtaatgatgataaagaatccatcatattggtcatcggattaaagaagttcccaacataggttgtgaacgcataaaccaaacccgccgtgacaaagctatgcagggctgagacaccaaacaagctcaagacaacgaccaatgccagtgtatagagtaaattcacaattggtgcgagcaacaacgagttcgttcgaatcatcgcttcgcgcgtttttaaatagtccgcgttaacttgttcgaattcgtcggtcaaccgtttttcctggcggaattgttggataatcgtaatcccttcgattgattcgttgagtttcgtattcaactgactcaatttttcacgcatatgccggtaaacccgcgcactgtaactactgtaataccagataacaattaacaatattggtagaaacgctgccgttgcaagggcaatttttggtgaaattaaccacatcgcaatgaacgctgaaatgattgaaaatgaaccgactaacaaggataagaaaacattccaataatcaatcaaagtcatcgtatcattcgtgacccgcgatacaatcgagcctgctggcgtctgatcgaaataacgcatcccgagttgatggagcttctgaaataaatcgcgccggacatcttccatcgcgcgttccgaacccattccaaaaaggaaagattggaaaaattgtgtaatggctttgagaatcacgcctaaaccgtacaacgccgcaacccccattaaaacttgggtggtcgcactctgattggttaagtaacgatccataaagacttgtagtaatcgtggtaataaaatattgatggtcgctaaacctgcggcggccacaattgcgccgataaattggcgtttatagcgtttcgtataaccaaagaggcgtttcatgatgtgcaattgctctttcaatggaactttcttggaccattctgattgatattgcttggccatcttatgcacctcctaaggcttgacttaattgttgcttcaaccacatctctgcgtaccagccatctgcggcaaggagtgcttcgtgtgtcccacgttcagtgatttgaccgtcatccatgacaatgatttcatcggcgtgcatcacactactcaagcgattagcagtgataatggtggtttgatcagcccgcatcgttttcaaattcattaaaatcgcttcttcagtctttgcatcaacggctgatagcgaatcatctaagatcagaatttctggatcagtcataatcgctcgcgcaatcgcaattcgttgtttttgcccaccagataacgacacaccgcgttcaccaacgaccgtttcataaccttggacaaacgttaaaatatcatcatgcaccgcactcgaaatcgcggcatcttcaaccgccgcttgatttcggtcaaaatcagcaaaccgaatattgtcgcggacatccgttgaaaataagaaattatcttgtggcacatagccgatactatcaagtaacgcatccagcgaataatcccggatatcgtgaccatcaatttgaatctcgccttgatactgatcatattcacgcaataataatttaatcagtgtggttttacccgaaccaacttttccgacaatgcccaacgttttaccttgtggcagagtgaacgccacctgtttgagcgttggttgtttttcgccagggtacgtaaatttttgaacagcataatgaatatcgccagttgctagtgtttgaatcgcatccggtgcttcgacaatggtgctggtttctttcaaaagttgatcaacccgatcataactcgcattgccccgttccaagacgttgaacaagcgcccaatcgcaaacattggccaaacaagcgccgcgatataactaatgaacgaaatcaattgaccaatcgaaatgctgtgattcataaccaacgtcccgccataaatgattgttacaatgtacgttaacccgataatcaaactgatggcgggatcaaataaaccatcaatcatattcacacgtttattaatcgcaattgtcttcgtgacaatctcgttgaaatctttaatatcagcttcttcttggccaaacgtttttaagactttaatcccagagacactctcttgggttttatcattcaaccgtgaaaaagccgcctgtgattgcccaaacgctgtgtgtaaatgtgcacctaaccgtcgtgacgcaacggccaacaagggcattggaatcaaggccatcaacgttaagcgccagtcaacgaaaatcaccatcgcaataatcgttgtcccaccagtgatgattgaatcggcaaaggttaaaataccggcaccagccacttgttgaatcgcggttaaatcattcgtggcatgtgccatcaagtcacctgtccgatgtttttggaagaaggtcgtgtccatcttcatgaaatgccagaacaatcgactccgcaatgtccgttccagtttagccgcgccaccccaaatccgggtccgccaaccatagcgaaaaatatattgtaaaatcgctgcgcttaacaagacgccgagccacatgattaatttttgggccgttaattgtttggcatccattaaatcaaccagggtcccaatcacttttggtggcacaatttggacaatcgccacgaggactaaaaagatgacgccccataaatagcggcggtattcttgtttaaaataccaccctagttttttaaaaattcccatgttgtgctcctatcctctaaaattcgataagtcctattataacaatcttaattaagccggacaatcatttgtatttccgttcttattatgataaaaaaagagcttctaacaaacgacttgttcgttagaaacccttttaaaaccgacttgactgttttattttttgttgctacgtttttgttgtgctttcattgagctcatcatctgatttaatttcttttcagatggtttttgacccatttgcatcatcatagcctttaacatttcttcgttaattggtggattgtcttggaaatacttcttcatgtaagcacgtgcgccaaagaaaccagcgactgcgcctaataaagccccaatgacaaataataaaatgcctaatcccatatcttatgcaccccttcctaattcagttcacttaaatagtttacacataattaacctaaaaagaaagcggaattctaagattaatcgtcacgcaagcctttttcccgttggatatccttcactttttcaggagtgacttccttaccttctttgtcatacacttgtagcatctcaacttgtgagcggaaactttcgcggaaatcctttaaataggcatcgcgcagtgtttgacgttctgctgtttcagcttcagttagtccttcagcttttgctttgtgtgctaattcattaattcggtctaatcgtttttgatccattgccatcttgttgccctccaattcaaactatttgtctattttggactaaaatccgtaaaatgtcaaaaaacacgaacgcttgtttgaaatcccgctataggtatgctaacatatagctattagaacaaatgaggtgctcttatgacgagaacagaatccaagcaattagaggtcttgcgttttatccatgaccgcgttcaagataaaggttatccgccaacggttcgtgaaatttgcgaagccgttaatttatcctctacttctaccgttcatggccatttagcacgccttgagaaaaaaggctttttacaaaaagatccgactaaaccacgtgccattgaattaacagcagctggtttgacagcaattggcgcatcacagaagaagattccggttctcggtgttgttacagctggggtgcccattttagcggttgaagaagcgaccgattatttcccgattccaccaagtctacaaactgaacaagatttgttcatgttgacgattcgcggcgaaagtatgattagtgccggaattttagacggcgatgaagtgatcgttcgtaaacaagcgactgccgataacggtgacatcgtgattgcaatgactgctgaagatgaagcaacttgcaaacgattcttcaaggaacctgatcattatcggctacaaccagaaaacgatacatttgaacctattattttgaatgaagttagcatcttaggtaaggtcgttggcctataccgcgacagaatgtagctatcaaaaaaggattcgccgttatggcgaatccttttttagcatgttccttcagccaggtccttacgtttagcgactgactgacgttacattttttcttaacgtgctttctgatgcaatttcttccgtctagccacgtcccgcaaacaacccgattgcatcggttattcaccaacctaagttaatgatcagactctcccagcttagaaagacatccattaataatccattaatttgaagatatcgtagtctttaattttttcgcgaccgtttaaatcgtttagttcgattaaaaaggctgttccgacaacaatcccacctaattcttcaaccattttgatggttgcggcgattgtgccgcctgttgcgagtaaatcatctgtgaccaacactttttgaccgggtttgaccgcgtctttgtgcatgtataatgttgattcgccgtattccaagccgtaacttgctgagacggtttcgcgtggtaacttcccctttttacgggctggtgcaaaaccaacgcctaatttgtaagctactgggcagccgacgatgaatccgcgggcttcagggccaacgatcatttcgacccctttactctttgcgtattcgacgatcttgtcggttgctgctgcatatgcttcaccatcagacatcaaaggtgagatgtcacggaatgtgacaccttcttcagggaagttgggcacacttgcaacgtaatctttaaagttgattgccattttaaattcgctccttaactctttcaacagtttgctactgattgaatcctgccagccagtctttcatctccgcgaaggttgagtaaacaagctgcttttccatgtcaattttagctaatcgttgttgataactcggtgcactttctaatgcgtgcttttccggttgttccgcggccgaaatgagaccacattctattttaacaaatcctaagtcaaaaaacacctgcaacataaaaattaatagcggcaatttaatttttagataagtcgctaattcccctaaccgtgctttttcaattcctggatgttgacgtaggtaaaccaagaaagtcgcaaactgtttcttatcaggaataccatcaagatatgccgaatacttactatagaagataaagctgattttagtggcctgttgttggcgataaaaggcttcaaattcatctaaatcagttggttcatcaaccacaatcaattctgcttgctgtgcgacatcggctgctaagatggcttggctgccggctgggatataactttgtagctgtgccagatgcttctcattgaaaaagacataggtgccactagctttaaacaactgttgcgtcaaccgattactccgttgatcgattaacacttgcccactcgtttgtaaatctttcagcatcaattgcaacgtcgtattgccgcgccaagtattctcacttagttgaccaactaatttcaactgttccaccgcttgtaaatcgtcgtacaacgcaccacagttaaatgctaagactgctaactgcgcttcttgatcaaccgccgtaaatttcaaatgcttctgatccgcaccgatctgcttcacattggtgacggatggcaccgtcatttcaatcaaaggttctgggttatccgtgccataaggagctaattgactgatggcttgataaacatcgggcgtcacatcagctaatgcgagctgtaaatcaaccgccaatgtgggtttcgttgttaaatcaatctgattatcagcggcataagtattcatcgccgtttgtaaagcagccaattgatcgactggcatcgttaagccgacagccatatgatgcccaccaaagtgcgtcaacaatgtgcgttgggcatcaagcgctttaaagagatgatatgcttcaacacttcgtcccgatcccttggcttggccagttgctagatcaattgctagcactaaagttggcttaccggtttgttcaacgatatgactcgccacaatccccagcacaccttcatgccagccttcatgtgccaacactaaggtcgcactagcttggttctcaggtgtttgtgccatttcgctagctagcgcagtaatttcttgcacaagaccctggcgctttttattttgttgttccacaaattgggcctgttccaccgcttgttcttcatcgaaagtcgttaatagattaacacctaagttggcatcacctaagcgaccaatcgcattcaaacgtggcccaatcccaaatccaatcgatgtggcgtcaagcgtttcttgttcaatacccgctgactggcaaagagccactaaaccgggacgactggtattttgtaattgttgtaagcctaagctaactaaaacgcgattttcatcagtcagtgacactaaatcacagaccgtcccaatcgccactaggtccaaactctcgtaagggatttcttccaataatgccgtagcgactttaaatgccaccccaaccccacataaatcactaaagggatactgtccctctggatgacgggggtgaatgattgctgtcgcatttggcaatgtacttggtagttcatggtgatctgtgaccactacatcgacaccgtgttcttgcgcataggcgattggctctaagccactcaccccgttatcaacggtcacaatcaactgggtcccattttcaacgagttgcttatagacatctaaattgggcccgtagccatctttaaaccggttgggcacatatacttccacatcggcgcctaaactttcgagcgtctcttgcatcaaagcggtacttgtaatcccatcggcatcgtaatcgccgtagactgtaattttttcgccgcccatcacagccgcttggattcgatcgactgccgtttgcatatcatacaaagcgtatggatcatgtaattgaccgacattcggatgcataaacgcactgattgcctcaggtgttttgattcctcgttgccacaacaattgggctgcggctttcgggagtgcttcaactgccattattgcttgtaagtcttggtcagttggtgttgcttttaattgccattcatattgtgcttccacattaatccctcgctacttccaaatcattaacttacccattatagcaaagattattatatttcgtttaataatccaatcaatgcttttgtttatcagtccaaatgatatactgttaattgatacacaaggttattacatagggggaaacaaccatgacagttttagtattaggtggcgctggctacatcggctcgcacaccgttgatcaattaattcaacgcggcacggatgtcgccgttgtcgacagtctcgtcaccggccatcaagccgccattaatccacaagcgcgcttttatcaatgaagactggtggcaagcagaaaaagcagccgtggaagccaactacgctaaaaacggtcaataatgtggatgtattatctaggatattgaaagatatggagcaattatgaaaaagacgcttaacaatataatctacaacggtatttaccagttgttgatactggcattgccaattatcacagtaccgtatgtagcacgtgtcttgggtgcaagagcactagggagttattcattcattacgtctatttccatgtttctgagttttgtgattttgatggggatgaatcaattaggttcaagaattattgcccaatcccacaaagataaaggtgaactaggtagtaactttgtacagttatggaaaatacagtttttagtaggttgtttagtgattctggcgtatacgttctttgcaatgttcagtgaatataaaacatacttgctattgaatattccatatttaattggattcgcaattgacatttcctgggtcttcataggattaggagaagttagaaaagttgttgttcgaaataccttaattaaaatatgttctgttgcaatgatttttatatttgtaaagaaacctagtgatttaggttattacgtattaattaatagtttaagcatcttttttgcaaatattattttctggcttaatttaaaggggatcatcacaaaagtaagttttaaagggttcttttctaagtcaatctttttaaaagaagccatgattttagttatcccacagcttgcagttcaattttataccaattttgatagtacgctagtaggttggattgcagggcctgtccaattaacttattacgatcaatcacaacggattgcgcgaatgttagtaacacttattacttcagttagtaccattttaatgccaagaatggtccaacttcgaatgaatcatgctaataatgaaaaagtggatcagttattaaaaacatcacttgactatacattattagttgcacaactgtttactatgttactaatggtaaatgcatccgaatttgtaccgtggttttatgggaaatcatatacaccaatgacgaataatatgttatgggtcggtttaataatgatttttatttcctatggtgaagtatttggcagtcaattctcattggtcaatggtgattataaacaatatgcaattccggcaattgtgggtgcggtaattagtgttattttaaatgtgatttgtgttaatatctggggagcggatggcggaacggcggttattattttaaccgagtttatcgtatgttctatgagaatttacatggttcgtaaagaagcagatttacggtatctagttcatgaacagcttaggtatgtacttgcttttctaatgaccgttcttgctgtcctgaattttaaaattgtgttacctagtttgttcttaacaatggtagttaattcaattattgtgacaattgtatatgtattgctacttgtattattgagaactagaattaacagagatattgtcagattagtaaagaaagttactcgttaattaatgattgagataataatttagatttaggagaaaataatatgactaattatttagtagtcggttccggactctttggcgcaactttcgcatacgaggcggccaaacgtgggaaccacgttaaagtaattgaaaaacgcgaccacatcgctggtaatatctatacaaaggaaattgatggcattcaagttcaccaatatggggcccacattttccatactagcaacaaagaaatctgggaatacattaatcaatttgcagagtttaaccgttacaccaatagtccagtcgctaactacaaaggtgaaatctacaacttgccatttaacatgaatacgttcaataagttatggggtgtggcaacacctgccgaagcggccgctaaaattgcggaacagcgcaaggtgttgggcgataaagaaccagaaaacttggaagaacaagctatttcattaattgggacggatatttaccaaaaactaatcaaagggtatactgaaaagcaatggggccaaaaggctaccgaattaccatcatttattattcgtcgtttaccagtacggttaacgtatgataataattatttcaacgatacataccaagggattccaattggtgggtatacacaaatcattgaaaaaatgttggctagtgatttaatcgatgttgaaacgggtgttgatttcttcgataagaaacaagactacatcgatcaatacgataaagtcatctttaccggtatgattgatcaattctttgattatcaattaggggaactcgaatatcggagtttacgctttgaaaccgaagaaatggacgttgataactaccaaggaaacgcggtcgttaactatacagatgccgaaacgccttatacacgggtgatcgaacataaacactttgaatttggtaaaggcgataagaataaaacaatcgtgacgaaggaatatcctgcgaactggtcacgtggtgacgaaccttattacccaatcaataacgacaaaaataaccgcttatacaaagcataccgcgatttatcggtgacagaacccaaagtggtcttcggtggccgtctagggcaatatcgttactacgatatgcatcaagtgattcatgcggcattacaagttgttaaggatgaattaaaatagaggagatttattctatgaaaattttaatcactggtgcaaatggtcaattagggaccgaattacggcacttattagatgaaaatcaaattgaatacgtggggacagatgctactgagttagatattactgattcagcggcagtcacaacttacttcgaaaagaataagccggaattggtttatcactgtgctgcttatacagctgtcgatgctgctgaagaagaacctggcaagtcaatcaattacaaagtgaacgtggttggaacgcaaaacattgccaatgctgctgaagcaatcggcgcaacgcttgtttacattagtacggattatgtctttgatggtacgaatgatcaaatgtacacagaagaaaccccagctgcacctaagaatgaatatggtcgcacaaaattggctggtgaagaagccgttgcaaatacaatgagcaaatactacatcatccggacttcatgggtctttggtgaatatggtaagaacttcgtttacacgatgttaaatcttgcgaagacgcatgatcatttaacagtcgttagtgatcaagtcggtcgtccaacttggacccggacgttggctgaattcatgttatacgctgttcaaaacgacgtgccgtatggcttgtatcaactttcaaatgacaattcatgtacttggtatgaatttgcgagcgaaatcttgaaggataaagacgtagaagtgagtccggtaacatcagacgaatatcctcaaaaagcattccgtccaagacattcaatcatggatttgacgaaggtcaaggcaactggttttgaagtaccaacctggcaagtggcattacaaaaatttatggcaaaaattgattaggatgagatgatgagtaataatctggataaaacggtgacgattagtattgtgacctataatagtcaatacgtctttaagacgttagatagtatcaaggcaactgtcttggggcaatacccggtaaaagtattggttcatgataatgggtcaacacctgagtatttggcgcaattaaaagcctatgctgcagatgatgttgaaatcattgaaggccaagagaatcttgggttcggtcatgggcataatgccaacctgaagctgacggcatccgattattttctgatttgcaatccggatattattttaaatcaaaacgcatttgaacggatgtatcggattttagcggatcaagatgctaatgatagcttagggatgctaacgccgaagattgttggtccggatggtacgacccaacatttagtacggcggaagctagatgtcttcgattatatgctgcgctttgtaccttttaaatgggttaagaagctatttgaaaaacgcttggcggcttatgaatgccgggatttaacggatcgacggcaagtgattcaatatggatctggtgcgttcatgtttacgcggactgatgtgattcgggctattgatggtttcgatgaacgcttctttatgtatttcgaagataatgacctttgtgatcgaattaaccaaagcggtcatacgattttatatgtaccagacgcggttgtcactcatttttatggaatggcatcccaccgcagtttcaagggatttaagatcttcttgaagtccatggcacagtattttaataaatggggttggcgtttcttctagtctcaaacaaaaaagacggttttctaccgtcttttttgtatgcctcttttattttatgatatagttatactaaatatatctctaattaggagcttaacatgccaaacttataccctgatgacagtcttttgttgcatacagacttgtatcagctgaatatgatgcttacttactttaaaaaggacttgcacaatcgcacagcagtttttgaatgttatttcagaaaattaccatttgaaaatggttacgcaatttttgctggtttagaacacatcgtgaattatctagaaaacttacacttcaccgaaagtgacatcgcttatctacgtgatgaggtggggtatccagctgattttcttgattatttagccaatcttgattttgatttaacaattcgttcagcagttgagggcgaattggtttttgggaatgaaccgattttacaaatcgaaggaccattggcgcaatgtcagttaattgaaacggccttgttaaacatcatcaattatcaaacactaatcgctacgaaagctgcacggattaaatctgtggtcggtaaggatcctgttttggaattcgggacgcgccgtgcccaagaactggacgctgccttatggggcactcgggcagcttatatcggcggttttgacgctacaagtaacgtacgtgcttcaaagatttttgggattccagccagtgggacgcatgcgcattcactcgtgcaagtctatcgcaatgattatgaagcattccgcgcttatgctgaaacgcatcacgattgtgttttcttggtggatacgtatgacaccctcaaaagtggtgtgccaagtgcgattcgggtcgctcaggaatttggtagcaagattaacttccaaggggtgcggattgatagtggcgacatggcctatatttcaaaacgcgtgcgccaacaattggacgaagccggttttaccgatgctaaagtttacgcttcaaatgatttagatgaaaagaccatccaaaacttgaagatgcaagaagccaaaattgatgtttggggtgtcggcacgaaattgattacggcttatgatcaacccgcgctaggggctgtctataagcttgtttcgattgaaaacggcgacgggaagatggtcgataccatcaagctttcaagtaatgttgagaaagtttccacaccagggcgcaagcaagtttggcgaatcactaaaaaagttgatggtaaatctgaaggggattacattacgctttgggatgaagatccactggaacaagattcaatttatatgttccacccaaattacacgtacattaataaaactgtgacggactttaatgcgcggccaattctacggacgatttttgaacacgggcaacgcgtttacaaattgcccgaacttggcgcgattaagaagttctgtagtgaaaatctcgactcgttatgggatgaatacaagcgggacttgaacccgcaagattacccagttgacctttcacaacgcacatgggatcacaaaatggcccaaatcagaagagtcaaagaagaagtccaaaatcagagtgcgctctaagcagagtggttcattcaacggttagcttttgagtatagtgaagtctggtgaataagtgcgctagcgcttatttgccggacaaagctgttgaaggaagcgcgtttcaaaaaagttagcaatctaacatttaaaaaaggtggtatttaatcatgagacctttacaagctgaaattatcgcagccttaaagacccaacctacaatcgatccgaaagcggaaattcgacggtcagttgattttctaaaagattatttaaaaaagaatacatttttaaaaacatacgtcctcgggatttctggtggccaagattcaacattagtcggtgctttagctgaacaagcggtccgtgagatgcgtgctgaaacgggtgatgaaacctatcaattcatcgctgttcgattaccatatggtgagcaggcagacgaatcggatgcaatggctgccattgatttcatgcaagcggatcaggtccggcgtgtgaatatcaaagcgtcagtggatgcaatggttcaagcactggcggaaacagaagtgacagtcagtgattttaataaaggtaatatcaaggcacgtgtgcggatgattgcgcaatacggtatcgctggtgaaatgaagggtgcggttttaggcacggatcattctgctgaatcaattaccggtttctatacgaagttcggtgatggtggtgctgatctcgtaccgattttcagattagataagcgtcaaggcaaagcgatgctggcggaattaaaggcaccaaaacacctttacgaaaagattccaaccgccgatcttgaagaagaccgcccagcattgccagatgaattagcactcggtgtcacttataatcaaattgatgattatttagagggtcgtgaagtggcagaagaggctgctaccaagattgaaaagtggtaccaaaagacagcgcacaagcggcatttaccaattactgtttttgatacattttggcgttaatcggctggattttgtttatccgctaaattaattggacgtcagaataatgttttacttgcgttttagattggttctgtcttataattagtttaacgataagggagtaactggcagcttgtctgcgataacgccaccaacaaggcaatattctggtgttatcttaattagtgagacttatgggggattctttgaattctctataggtctctttttttaccccgaaatctatctataggaggcacgacaatgacagatcaaccaagttcattctttacccaatcaacggatgagactttaaaaagtttagccacaacaactgatgggctaacgcaagaccaagttgctgaacgactcgctaaatacgggcgtaatcagttgactgagactaaacgaaaaagcttgttcgttcgttttttagaacagttcaaagatttcatgattatcgtcttattagtagcggcaatgattgccggctttttagcacatgaatggccagatgcgattattattctcgccgttgttatcttgaatgccgtttttggtgttttccaagaagccaaagcggaacaagcaattgatgctttaaaagagatggcaaccccggacgcacatgtacgccgtaacgggcagattgttaaaatcaagagtgaagaactggttgtcggtgatatcgtgctattagaagcgggcgatatcgtcccagctgatttacgcttgttagaatcagcggctttgaagattgaggaatcggctttgacgggtgaatcggtaccggttgataagactgttgcaacgttaaccgatcctgaaagtgggattggcgatcggaccaacatggcattcatgaatagtaatgtgacttacggtcgtggtgtcggggttgtgacgggcactgggatgcaaactgaagttggtaaaattgctgggatgttaaatcaagctggtgaaaccacaacaccattgcaaatgaatttaagtcaacttggtaagagtttaacgattatgattttaatcattgcggctgttgtatttgtggtcggctacttacgccacgcgcaatcaccaattaacatgttattaacctcaatctcattagcggttgccgcaattccagaaggattaccggcaattgtgacggttattttagcccttgggacacagaagatggttaaacgaaatgcgttggtacggaagttacctgctgtggaaacactggggagtaccgacattattgcgtccgataaaactgggacgttaacgatgaatcaaatgacggtagaaaagatttttaccaataatcagttgcaagaagcatcagccgacttggcaggcgatgatttagcgttaagcattatgaaccttgccaacgatacgaaaatcacagaggatggccagttaattggtgatccaacggaaacggctttaattgcttatgggcgtgataaaggtttcgtgatccaagatgccctagcagcagcaccacgcgtgggtgaagtaccgtttgattcagaacggaagctgatgacaacgattcatcaagccaaagatggtcaattattaatgaccactaagggtgcaccggatgaattactcaaacgcgtgagtcattttattgatgccaatggcgatgttcaaccgttagatgaagatgaacggcaatttttactcaaaacaaaccacgatttagctaaacaagcgttacgtgtcttggcattagcgtataaaccgttagatagcttaccagcaacaattgatccgacgattgaagatgagttaatctttgctggtttagtcgggatgattgatccagaacgaccagaagccaaacaagctgtaactgatgcgcattcagcagggattcggacgttaatgattaccggtgatcaccgggatactgcagaagccatcgcacttcgtttagggattattacacctgaacaagatgcggatgcggccgttgtgacaggtgccgaactggatcaaatggatgacgagacatttgctaaaaaagtcagtcagtacgcagtttatgcgcgagttgcgccagaacataaggtgcggattgttagagcttggcaaaaacatggtaaagtcgttgcaatgaccggggatggtgtcaatgatgcgccagccttgaagtccgcagatatcggaattgggatggggattaccgggacagaagtatcaaaaggcgccagtgatatggtgcttgccgatgataacttctcaacgattgtcgtggctgttaaagaaggtcgtaaagtctttgccaacattcaaaaatcaattcaatatttattgtcagctaacctaggtgaagtccttaccttattcatgatgacgattttaggctggcaaattctgcaaccggtgcacatcttatggattaacttagtgacggatacattcccagcgattgcgttgggggttgagcccactgaaccggggattatgaatcaaaaaccacgtgggcgcaagtcaaacttcttctccggcggtgtcttccaagcgattatctatcaaggtctcttagaaggtgggattacgcttggtgtgtatgccttagcgattacgtacccagtgcatcaagcgagcggcttagcacatgctgatgcgttaacgatggcctatgcaacgttagggatgattcaactcttccacgcgtttaacgtgaagtcagtgcaccaatcaatctttacagttggctttttcaagaataaagctttcaactgggctgtcttagcttcattcctcctgttagccgcaacgattatggtacctggcttaaacggcctattccacgtgtcacatctcgatattcaccaatggggaattgtcctagcagcctcattctcattgattgtgattgtggaaattgtgaagttcttccagcggagaatggctaaataatttgttgccaaccttgtaaagtgcttgtcaattaaactataataaaggtgattaaataacttttatgttagtgagttttgtagggaggattacgtatgcaaatattcttacagtttctgatatcacttttcatctttggtggtctggaacggattactcacgttcaaaataattggttgttgagtttcttactttatttagttattttcgcttgtatcgacttattgacaaagttaatgtttggtcagtcgtggacgagtagaatgttgaagagaagataggtaataatcgacgctagtgacaaacgagattttgtcgctagcgtttttttaatgaggtaaatgtcctttgatgaactaagcatgccttttctattaatgacacatgctttaatattttaattgcaagccgattgggaaattagtatactaaaccataggaaactaggaggatggacatgaataaaacgcaacaaaagcttgccaaatacggccaagctgtcaacgatttaatcgataatactgaaaaagtacaagaagggatgagtaagtatttcacccctttaaaagcagccgttgctgatggtaagttagccgaaatgagcgaacaagactatcaaaagacagcacaaatcttcagagatggtgttgatcaatatcacgaattcttagcacaattcaaaacagttgttgcgcccgctcgtttgatggggaacaaccaacgtttaatcggtgcttacgctgatttcattcaaggctgtgaagatttaattacaagcatgcatgatgatcaaaccgttgatatgcaagcttttgcagcttcagaaatgaatcaagacaaagcaacggaacggatttctaaatacatccaaaatatttcaagaatcgcttagggcgaaagttgacagttcccaagtcgggggctgtttttttaattgaagcaaaaggagtgcaatcagatgcctgatattcaaaatcttgtgattcaacaattaacacagtatcgaccacaacaaatcaaagcaacgttaggtcttttagaagaaggcaataccgtaccgtttgttgcgcggtatcgaaaagaacgaacgggaagcctcgatgaagttcaaattcgtgaaattgaaagcacatttcaatacttaacgacgctcgaaaaacgtaaaaccgatattttgaaaaatatcgctgaacaagaaaaattaacgccaaaactcaaacaacaaattgaaacggcaacgcaactgcaagctttagaggatctgtacttaccctataaacaaaaacgacggaccaaagcaaccatcgctaaagaagccggcttggaaccttttgcgcagtttatcgcagggttacctagcttaaccgaacaagcattattggcaaaagctgaagcttacctcaatccagatcaaaaaatcaatgatacagctgctgttttagctggtgttcatgaaatattggcggaaaatattagtgaaacagcaaaatatcggaattgggtgcgccaatatacttggcaaaatggtcagttggccagtcaagttaaagacgaagcagccgatgagaagcaagtttatcaaatctattatgatttcactgccgatttaacgaaggtagcggaacatcaatatttagcgattaaccgtggtgaaaacgaaggtattttgaaagctaaaattatgattgacgatcaagtaattgccagtcggatcagccaagatctgttgtatggacaagattcagcgtcagcaatggtcatcaagtctgcggttgaagatgcctataagcggtttattggaccggtaattgagcgtgaattacgcaagcaattaaaggagaaagctgatcaacaagcgattagtgtctttggtgataacttgaagcatctcttgttgcaaccaccattgaagggtaaagttgtattaggctttgatcccgcttatcggactgggtgtaaattagccgttgtcgatggcactggaatattcttggataagttagtcatttacccacacaaaccagcttcagctgacaaacgatcaaaagcggcggatgaattcactgctttactcgagaaatatcaagttgaaatgattgcaatcggtaatgggactgcgagtcgtgaatcagaagaattcgtaacgacgtgtttgaaatctatttcccgggaaattttctatgtgattgtcaatgaagcgggggcttctgtttattctgcgagtgatgcagcacgggcagaatttccagatttacacgttgaagaacgaagtgcgattagtattgcccgtcgtttgcaagatccgttagctgaattgatcaagattaatccacaagcagtgggggttggacaatatcaacacgatgtggcgcaaaaagagctcactgtgcaactcgatacagtgattgaggatgtcgtgaatagtgtgggagtcaacctgaatacggctagccctcagctgctacaacatatctcagggttgtcagcaactactgctcaaaacattgtgcaatatcgcaatgaaaacggcctttatcaaaagcggagtgctttgaagaaagtaccacgcttagggcctaaagcttatgaacaatcggtcggattcttgcggattattaatggggacaatccactcgataatactgatattcatccagaaagttatccaacggctaaagccattttgaaatcatttgggttaaccgttgatgctttaggaagcgatgcgttgaagacggcgattgcacaaatgcaagtaccggctctagcggctgaattagaggtcgggattgaaacaatcaccgacatcttaagtagtttgcaaaaaccagggcgtgatttacgggatcagatgacggcgccattgttacgtcatgatgtcttaaccttggcggatttgaaaccgaatatggcgttagaaggcacagtccgcaacgtgattgattttggggcctttgtcgatattggtgtgaaacacgatggcttagtgcacatttctcaactggcaaaccactttgttaaacatccttctgatgaagtggcagttggcgacgtcgttcaggtttgggtgatgagtgttgatcaagaacgtgaacgcgtacaactgacaatgaaagcgccaaaggcaaatgactgatcaagccttaactgaattgattgaacggttatcgttgcagttttttaatcggccgtttgtgcatcaagtaaatttcaatcggcgtttaaaaacaaccggcgggcgctatcatttacaggatcatcatatcgatatcaatccaaagatgttgaccgaacatgatacacagaccttagaaggggtgattaagcatgagctttgccattatcacctgcatctgttgcatcgcggttaccgtcatcgagacgcagagtttaaacaattacttgcacaagtcgggggtgcgcgctatgcaccagctgcacaaaagacagctaaatcgagcaaaattgtgatttataaatgttcagactgtgggcaagtctatccacgtcgccgtcgaatgaatacggctcgctatgtttgtcggcggtgtcatggacgactgatttatcaaaccacacaaattcaatgaaaaaaggccacccctatgtttaggggtggcctttttttagttggcgcgtaaagtttgattctgagtggtgtagcccagcttctgatagagggccaacgcagccggattattccctaacacggttagttctaaataatcgagcgcttgtgtttgttgccattgctttgcggacgatagcagttgtgtagcgacgtggtggcggcgtgcctctggtgcaacatacagtgttgtgagataagcaaagcggtgtgcgataaacaagggtgagggacttgtttgggctgttgtaacgtgacaaaaggcatcgatttgcgcatcttggttttgatgaacaaagactgcttgtagtggatcagttatcatttgttgccagtcaaagaactcaggcgtgtaatcagcttggtaattagtgggttgtagcacatgcatttcagtcgttaattgttgatacagggtggttaatttggcaatatcggttagtttagcggggataatgggcatgtaatcgtctccaaagtaaaattttaattgacttcaatcatcgtttctcttatactaatgtacgtggcttaaagtgataaagcaagttacgcgggtgtggcggaatggcagacgcgcaagattaaggatcttgtcgggaattttcccggtggaagttcgagtcttctcacccgcatcataattcagttaggtaattccaattggaattacctttttttgtcccttgatgtaaatgattgaaactagggtgacaaatcgctataatgagcaataaattcagtttaggagtcagttaggatgacacataaaaattcatcagcttatacgattagtattatggcgattttaaccgcttttttaatcattcaaagttttattccgatggtcggttatattaatatcattcctgggctaccagccgtaacaacaattcatttaacggtcattattggggccgtgatcctgggcacacgccaaggggcgattctaggattaatttggggtttgatttcattatttagagcctatacctctccaggcgatccgctttcacttttaatctttcaaaatccaattatcgctattttaccgcggttgatggctgggatgattgctggctttacgttccaacacttatatcaaactaaaattcgtaaaaccggtgcaatggctttagctgggattttcggggctttaatcaataccattttagtgattggcttaacgcgtgtgctttacggacaccaagcggcagggatgtatcatactgatccgacccatttaatcatcgtgatgcttggcgttgttgcgttaaatgctgtaatggaagcaaccttagcagctgtggtgacaccactagtcgcaacaccactcatgcggtttaaacggacgcaataacaagtgcgggtagctacagccgacgattgtggtccgccacgggttgaataattaaagattgaaaaaaggagttggacaaacgtgactttgtccaactccttttttgtttattccagttgtttttgcactttcttagcatgcgcagcaactgtgttcatgttgaccttagcaatttcggcttgttgataaactgaactgtaatattgatttaaacgattgattggtgatttaagactgtcttcgtctgcatcagcatctgtatggtcgctgtaaaattcatcagatgctttagtggccgcgttgtagaaggtggccaaggttgtataatcaagtgtcgaaatcttaagactttgatttaaatctttgacttgttcaatcggcaattcatcgttttcttgcttgaccagtttggtgaggcgtttaatgaccggtttgagcacagcttgttgttctttaagactttgaaaggctgcttcgcgcttggccgcagtcgtcgcaatcttagtatcttcaatcgttaatagattttcgtcgggatattttttttgaatcgtgagatagttatcaggaactggatcgccgattgtttcgagggttgaaagagctgttcgttgttgcttagtcgcatcttcaacggtttgcatatcggcttggagttgatgtttagtatccatcggtttttggcaagcggctaggctcaccccgatgaagataattggtaatagccgtttcaatagttttagcataagcaagcactccaatgagaaaaagttatactgctatcttaacgtaattaaagcaaaaagccaaatcatttggggcatgattcaacatataaaataacacttgtctaaaaacacggatgctgattgtccgtgatagaaaacggtttatttttattgccaaatggttgccaatggttgttgcctgtgttacactatgtttgtactttttgaatggttgcggtacgaatgtttccaaaagaactttcttccatcggaccaccagaaatacacaaatttataatgtgtcatcgacacaaggaggatttttctcatggaaaacggaactgtaaaatggtttaacgcagaaaaaggttacggctttgtaactcgcgaagatggtagtgatgtattcgtacatttctcagctatccaaggtgaaggctacaagactcttgaagaaggtcaaagcgtttctttcgatatcgaagaaagcgaccgcggcccacaagctgttaacgtaaacaaaaactaatttaaaaattaacccaggggtcgcggcaaaagcaattttgtcgcgacccctttttttgattgggtggtgagctggagatgttaacgtatcaattgattgagggcgcagcacggcgacagtggctggatgatctattgttagcggatgaagaagtcggcatgattgaacgctatttgatgcatgggcaattttacaccttaagcgatcagcagcaagtcatcggggccttccatctgatggcactcaacgatcagcaggtagaacttaaaaatattgcggtacggccagaatggcaacatcgaggattcggtgggcaaatgatgactcaaattcagacgattgcaattgaccaagggtttcaatcattgctagttggcactggggacggtagtttggcagcgattggtttttatttgcgtcaaggctttcggttcgaacgaattcgcaaaaacttcttcgaccaatatcaaacgccaatctatgaaaatgggattcgcctaaaagatatggtggttctcactaaaatactctaaaaaaacctgaccaaattggccaggttttttgaatggattaatcgagatcagtgcgtttttcaaatggatagacaaagccccattcagcacgtgcgtctgacatgatgtccatgacatcgcttgataattcgagggtatcgtttgattgatttccgcgcactgtttcttggaaatcatggagttcatagttcattgcgttggttgcgtcacccgcttgaatggtctcaacgcgaccatctgggaaagtgagggtggctttgtcaggccgtggataatcgtcaacggtgacatagccattttcataaacgagaacaccttgtttaggcatcttcgcatgaatgtttaaggtaacagtcaccatttcatgcttggcattatttaaaagtaatgttgattgctgatcaacaccggattctgatggcacccattgcgtcgctacaagttctggtttagcagttaacatccgacgtgcaaatgagagggcataaacaccaatatcaagcattgcaccgccggcaagtgcgggactgaagaagcgattgtttggatcaagctctttataacttccaaaagagacttgaattgattttaaagcgcccaagtgattagcgacttgttggcgttcaatctcagcaaacaatggcatgtgataaatggtcattgcttcagctaatatcaagtgcttttcgttagcaagagcctttgctgcattgagttcgcggcggttcatcgtaatcgctttttcacagaagacgtgtttaccggcttcaagactcgccataatgctttcgaagtgataattgtggggggttgcaatgtagacgatgtcgatgttgtcatcaccgagcatgtcggcataactaccgaatgcatgtggaatattgtattggtcggcaaaggcttgtgccttatcgagtgaacgagaagcagccccataaatgtgaccatcaggttggttaaaataagttgcgaaactattggcgatattgcctaagccgataattccccagttaagcgttgtcaataaaatcagtcctttactatcgtaatcggttacagccaatattatagcaataaaagcgctaaatagaaattaaaggggggttacaaattaaagattggtgttctgaatgaatttgtgtacaatatagaatagattcagataaagttgaggcagaggattggcaaaaaaacgtaaacgcaagacgacaaaacgcaaaccaacagctaactactattctaagaagagacgccacccaaccgattggctagtggtcgttttagtgagtctatttattctcggaattgggctcgttttattagttcggtataatggacaaaaggcccaagaagaacttgccgatcaagccagacaggaacaacaatcgcgccaagctaagaagcaagcgtttattaaaaaaatggtgccatatgcccaagaattacagacgaaatatcatgttttaccaagtattactttagcgcaagccattttagaaagtgattgggggaagagctcacttgctgcgcaataccataattatttcggtattaagggtgataatgaggccaacaccaaggaaatgacgaccaaggaatatttaaatggtcagtgggtaacgacaacagcgcgttttagagtatataacaattatcaagaatcgatgcttgaccatgtacaattgtttgcttatgggacctcttggaaccggacgcagtatgcacacgtaatcgcggccactaattatgagcaggctgcccatgcattacaacaagacggctatgcgactgaccctgattatccagcgaagttaattgagctcgttaaggcttaccacctcgaccaatatgatcaataaagaatgctatgaaacaaatcatgggaaatctgctactaattaatctcaaaagagattgccacaaattccggtttgtgacaggctcttttcaaatcgctgaataactggatttgagcttgttgtgttgctttttttgtggtaatctatttttaattcaatttcagaaaacattattagtcgttactactatcggtagtgatgtttaacgatgctacaaaggagagctcagcgtgcgactattagaggaacgcattaaaaaagatggtcaagtattaggtcaagacgtattgaaggtcgataacttcttaaatcaccaagtggatccagatttaatggctgcaatgggtgaagaattccaacgcttatttaaggataagaagattactaaaatcctaacggttgaatcatctggcattgcgcccgctgttttcgcgggcttagcattccacgttcccattgtttttgcaagaaagcacaagagtttaacgttacaagataacatgtatagcgcaacggtttattcatacacgaagaaagtgaataaccacatttcaatttcgaagaagtttctgaatgcagacgatcgcgttttagtgattgatgatttcttagccaacgggcaagcggttgaaggcttactttctattattgaagaagccggcgcacaacttgaaggtgtcgggattgtcatcgaaaagactttccaaaaaggtcgcgaattgttagatcaacgcggcattcaagtggaatctttagcacgaattgcagcgtttgaagacggtcaagtcgtctttttagacgaaaataaataaatgttatttaacggagtgctgagaggcactctttttttgtctaaaaatttgttatcatggaggaaagtattaggcagacaacgcttaaattcgctataataagggtatacagtttggtgaacaggaaagcaggtaatatgatgccagttatttatccaggacaaaccatcggaattattggaaatgatcaacgggcctatatgttggcgctcaaagcaaaagaaatggggtatcgggtagccgcgattgtgaccccgcagatgcaaaatacctcatttgcacgtttaattgatagtcagatcgatggtgaattcaatgattatcaaacattagtccaactcggtgaagtcagtcaagtgttgacctatacgaatgaattattagatgagacggtgctcgaacaactggcacaacattattatctacctcaaggcagtaatgtgttgtctgtgacgcaagatcggtacctcgaaaaagtctttttgagtgatttaaatatcaatattccgccctatgcgacagttgttgatgtagatgatattcaagatgcaatcgattcaatcggatatccatgtatcttaaaacccattcaaaaaggttacggtaagcagtatcaacgttttattcaacaaccgagtgaccttgaaaacattgaagctgcccttgagttggggacttatattttggaatcttggattcccgacgcacaagaactatcagtgatggtcgttaaaactgaagatggtaagtgtgtgacactgccagtcatcgaaaatgagtttgaagatcatcgcttgaaaatgtcgcttgtgccagcacggattaatcaagatgttgcgactgaaattaatcgattagcccacttaattggggaaaaattagactatacaggtgtttttggggttgaattctttttaacacccgctatgaatatttatgtgaaacgaattatgccaacaccgcacgcaacgggcgatgtcttgacacataccttgaatttctcgcaatatgaatatcatttgaaggccatctgtcagttggcagtcggcccatcacgcctcaataatgcggggatgaccttagggattcaagaagcacaacggtcattaattcaaacacagatgaagatcaaaccggattggtactttaatttgcacaacgtcacgaccaatcaacagattggatcggtcacagcaaccggacaagccatccaacccttaatcgataattacgaagcggcagacttatattagagtgcgacagcgggcggttatcttttgaggactagcataggccggcgaatgagcaacgcagtcgatcgttggacggacgtagctagccgcagaaagatgcccgatggagcacgtttcaaaacagagtgcatttgtggcggttatcttttgagcattaactggatttgacgagttggtgatgcaatcgcgaatttggcaaatttggttaagcacagaaagatgccacaaaaagcacgttttaccatcaccagcatttaggtagtatttggaggagaagtttatgttagaacgttatacacgtcccgaaatgggcgccatttggacaacggaaaatcggtatcaagcttggttggaagttgaaattctagctgtcgaagcgtgggcaaaattaggcgatattcccacagaggatgcgcagaaaattcgcgcgaatgctagctttgatttggcagaagtcaatcgcttagaagccatcacacaccatgatgtggtcgcattcacccgtgccgtttcagaatccttagcggatgaaaaaaagtgggtccactatggtctaacttcaacggacgttgttgatacagcacaagggtatattttgaaacaagcgaacgatttaatccgggctgatatcgccaattttatggccgttctaaaagataaagcttacgaataccaaaataccgtgatgattgggcggacgcatggcgtgcatgctgaaccaacgacgtttgggttaaaactagcaacctggtatgctgaaatgaaacgcaatcaagaccgttttgaacgcgcagcaaaaggcgttgaagccggtaaaatcagtggtgcagttgggactttcgccaatattccgcctgaaattgaagcctatgtgacagaacacttagggatccgggcccaagatatttcaacgcaagtgctcccacgagatctacatgctgattacattaacacgatggcggtcgtggcgacctcaatcgaacattttgcgactgaaatccggcatttacaacgaacagaagtccgcgaagtggaagaattctttgctaaaggtcaaaaaggttcatcagcgatgccgcataaacgcaatccaattagttctgaaaacgttagtggcttagcccgtgtgattcgcggtcatgtgattaccgggatggaagatgtgtcattatggcacgaacgcgatatctcacatagctcagctgaacggattattttacccgatactacgattttattggactacatcttgaatcgcttcacgcggattgtgaagacgttgacggtcttccctgaaaagatgaaggctgacatgaacatcacccatggtttaatttacagccaacgtgtcttgttgaagttagtggatgcgggtctgagccgtgaagcagcctatgatttggtccaaccgaagacagccttagcatgggatgaacaaaaagatttccgccaattattagaagccgatccgaaagtgacgagtgaactttcaaaagccgatttagacgacgcctttgattaccaatggcacttaaaacaagttcaaacaatttttgatcgggtgtttgcataagcatccgacataaaaagccaccttagcctaaaagttaggttaaagtggctttttttatggcaaaataaattctgattcgaaacgacaaacttggtgatggttactgagggcgacttcaaacgctttttgccctagggtgaagaagtgatggtcaattgttggcagttgcaataaaaaactggataattgtttttcttgaccaattaaaagcggggtcggcagttgatgatccagatgatattggcggacaccagcggcaatgtcgtcgccatttgtaaaatagcaagcgagggttggctgtttttcaaccagttgttcagcggcgcgatagccatcttcaaatgagcgcatgccaccgaccattaactcggaatcaggttggcagttgaaaacttgttgataagcgttcgtgacggcaatccaggtcgggctttgcgctaaattacgacttaatagtagaccaatttgctgtgctttgtgggctttaaggtacttgaatgccgctaaataggcgggctcacggtgagaataaacggccgagatatgatgggtccccgggtcttcacaacagacaatttgaccataacgcgtgtactctgctaagactgagagtgcaataccatgtgaagtaaaaatgagtgcggtaaaattcttacgttttaattgttcgagataatctagttcgactgcttgattatattcggaaggtaggagcacaacgtgatagccgcttgaaaacgcggcatccataatcccgtttaagagttggttgaaatacggatggtcattgtgcggtaggacgaccccaatatttttattttgaccgaagcttaaatcgcgcgctaagctattaggcacgtaatcgagttgtttaatgaccgcttcgattgccgttttggcaggttcagagacgtatttttgatgatttaacacacgggagacggtcgaaaccgaatagccgcttttgcgggcaatatcacgaattgttggcataatcctaacctactttttgattaactttagtaatgtatttctttagaccatagctgaagccactgtgatgattagtcttcgtaatgaattgacccgccatctggatttgatcactggcattgcccatgacgatggggtggccaactagcgataacatggctaagtcgttttgaccttcaccaaacgcggcgcaatcagcgactgttagtccagtgttttctaagatggtggttaatgcgttagctttagtggcttcatgactcgtaatttctaaggtcattgtacctgattgttgtactgaaagaccaggcaagtggcattggttgatgaaatcagcaacagttgcccgttgttgtgtcgtttgcataatcagttgaattttgaaaagcttgagaaatggattttgcaattgatcactaaaattgatgagcgtcggcaattgaccggtttgcttagcgattgcctcaataccagcgtcaattgtctgcgtgtaccagtggtgtaagtcatacgcacttaaactgatgtcactaaattcagattgtaatgcggcaattaatgttgcgacagcagaggttgcaagtggatattctgctaaaaccattgggaaaagatctgtcggttgataaattaaccccccgttaaaagcgacttggggtgtcgttaacgctaactgatcaatcgtagcttgcatttcttgtggtgaacgcgcagaaatcaaggaaattgggagtgggcttgctttgacagccgcaatatctttttcagaaagctgtccgtcttggtttaacaatgtaccatctaagttagaaaaaatgtatttaatcatgatgcataccacctttcttggattaaggtgagtataatttatgaaacgcgtcccaggtcaaggcagaagattgcgaaaaattagaatccgttttactaggtcgtgttcgcttttttctacctatctagtttggtataatataggctgattgcatttacggaaggatgactaatttgtctgaaaaagaattgttacaagggatgaacgataagcaagctgaagcggtcctcacaacagaaggcccacttttaatcatggcgggtgctggtagtgggaagacccgggtgttaacgcatcgggtcgcttatttaattgaagaaaagcacgttttaccatggcgcgtgctggcgattacgtttacgaataaagcggcgcgtgaaatgcgtgaacgggtcggtaacttactcggcgaaggggctcaagatgtttgggtatctaccttccatgccctttgtgtgcggattttacgtcgggagattgaacaaattggctacaatcgcgcgtttacaatcgcggatccttctgaacaattgacgttaatgcgccatgtttgtcgggatttaaacatcgacacgaagaagtttgaaccaaaggcgattttaggcacgattagtaacgccaaaaatgaactccaaacaccaagcgactatgcgggtctagcaaacggaccattcgaaaaaattgtggcccaatgctacaccgaatatcaaaaacgactccaacaaaatcaagcgctcgatttcgatgatttaatcatgcaaacgatccgcttatttaaagaaaacaaaccaacgcttgaacactatcaagaaaaattccaatacatccacgttgatgaataccaagataccaatgaagcgcaatacacattggttaacatgttagctgagaaatacaagaatctctgtgttgttggggatgccgatcagagtatttatggttggcggggcgctaacatggacaacatcatgaacttcgaacatgattatccagatgctaaatcagtgatgttggaacaaaattaccgttcaaccaaaacgattctagaagcagccaacggtgtgattaacaataatcaatatcgtaaacctaaggaattgtggactgaaaataacgaaggccaaccaattacttattatcggggtcaaagtgaacgtgacgaagcactctttgtcattacgaagatccaagaagaaatgcaaaagaaccaacgtaaattcggcgactttgccgttttataccggacaaatgcccaatcacggtcaattgaagaagcgtttgtcaaagccaacatgccatacaagatggtcggcgggcataagttctacgatcgtaaagaaatcaaggatatcttggcttacttacgcctagtcgtgaatgcgtctgattcaatgagttttgaacgggttgttaacagtccgaaacggggaattggccccggcactctcgaaaaattaacgcaattcgcggatgatcatcaatggtcattacttgaagcagcgcaaaatgcggaactctcaaccattccaggtaagagtcgcaagacgttgatcgattttggcaacgtcattggtgacttagcgaagatgcgcgaatttttaaacgtgacggaattaacggaacaattattggataagactggctacaaaaaagcgctcgaagttgaaaacaccctcgaagcgcaaagtcgtttagaaaatattgaagaattactctcagttaccaaacaattcgacgaacattatgaaccagaagaagatgacagtgatttatttgtggacttcttggccgaattatcattggtctctgatttagattcagtcgaagaagaagccagtgaagtgaccatgatgaccttgcatgctgctaaaggacttgaattcccagttgttttcttgatggggatggaagaaggcatcttcccactatcacgtgctttattagaagaagacgaactggaagaagaacgccgtttggcatatgttgggattacccgtgctgaaagcaaattgtacttaaccaacgcttattcacggatgttatacggccgtcaacaaagtaaccaagcgtcccgatttgtcggcgaaatcgatgataaattattggattacgcaaatggcaatgctggcagtattccagaacgcaatgtgccatttggtaagagcaatcgttatgcacgcgcaacggctacaacgtataatgcaaataaaacaacgacgagtcacaagattgccgacacaactggcggcgataacagtggtgcttggacagccggccaaaaagtccaacacaagaagtggggcattggcacagttgtcaaggtcaacgggaccggcaacgaccaagaactagatatcgccttcaaagaacaaggcgttaaaagactactagcaagcttcgcaccaattgaaaaagtagaatagagtgcgtttccgacgattatcttctgaggattagcacaactcggcgaataactgctgcaagcagttgtttgacgagtagcgctaagcggaagttgttgcaaccaaaaagcacgtttcaaaacagagtgtgtttaaagcggatttgactctgagcattagcacagtgttgtgaatgaccgacaaagtcggtcgtttgcaatacgaagctaagcacaagagtcagctttaaaaagcacgtttcaaatcataaacagtgaggagtcttcattatgggattagctaaaccaatcgatcaatatacgcaaactgaagcggcagcggcggcccaagaactccgccagacattagctgaatacagcgaagcctattacacaaaggacgccccagtggttgaagatcacgtgtacgatgaattgtatcgcgacttagaaacgttagaagcggcctttccaatcattgttactaatgactcgcccactcaaaaagtcggtgatcaagttctgcctggctttaagaaagtgacgcatgaagtaccgatgttatcaatgggcgatgttttttctgaggaagaactcgcgacttttgataatcgacttcaaaaaaacgttgagcatgccatcgaatataatgtcgaattaaaaattgatggactcgcgattgacttgatctatgaaaaagggcaatttgtccgtggtgcgacgcgaggcaatgggacgattggggaggacattacccagaatcttaagaccatcaaggcgattccgcaaacattaaccaagccagtctctattgaggtccgtggtgaatgttacatgcccaaagcctcttttgcggcattaaatgaaaaacgggaagcagaaggccaaccgccatttgcaaacccgcggaatgcggctgctggtagtttacggcaattagatgccaaaatagcggctgagcggaatttgagtgcctttatgtacacgattgtcacctttgacgatgtgcaagcgacaacccagcacgaagcgcttgaagtgcttgcagaactcggctttaacgtcaatccaaccgctgaagtttgtcataatatgacagagataaagacctttatcgagcgctatcaagcaacgcgggatgacttagaatacggcatcgatggggttgtgttaaaagttaacgacttagctttacaacgccaactcggtaatacggttaaagtgccacggtgggagattgcttataaattcccgcctgaagaagcggcaaccattgttcgtgacatcgaatggacaattggtcggacaggggttgtcacgccaaccgctgtgatggatcctgtccagttggctggtacaacagtcgcgcgcgcctcattgcataacgctgatatgttacgtgataaagatgtccgtttgttggacacggttttattacacaaagcgggcgacatcattccagaaatttcacaagtagtactggctaaacggccggctgacagtcaaccgtatgtgattccgacagaatgtccttcgtgtggtcatgaattggttcatttggatgaagaagttgcattgcggtgtattaacccaatgtgtccggcacaagtgaaggaacagttaacgcattttgcttccagaaatgcgatgaatattgacggcttaggtccacggattattgcccaattattggatcaaggattggtccatgatgttgccgatttataccgcttaacggccgatcaacttgcgcaactggataagtttaaagaaaaatctattaataatttgttaaatgcaattgaagctagtcgccagaattcgctagaaaggttattatttggattagggattcgccatgttggtgccaaagcagcccgtttattagcggaacatttcttgacgatggaggctttgatggccagtgatcaagaagaaattatgtcggttgatacgattggcgagacgattgcggatagcttagcgacttattttgctgatgatcaagtacaaactttaattcgtgaattggctgaagtgcaagtcaacctgacctatactggggtgacaaaggcacaagctgaaaatagtgatagttactttaacggaaaaacggttgtcttgaccggtaaactatcgcaatatacccgcggtgagttgaaacaacaacttgaagataacggcgctaaagtgaccggctcagtttcgaaaaaaacagatattttgattgctggagaagatgccggcagtaaattaaccaaggcgcaagcattggagattccaattatcaacgaagcagacctagatagttatttggcgcaataagcgaatcaattaggacttataaggaggccattttcagtggcaaagtataaattatgggtagttgcagccgcaacggttttattgttggcaggttgtacaagtttacaaagcaattcgagttcgtcatcatcaactaagtcgactaaaaagctacaaacgaccgggaaagtgactgacagcatgtatgaaggggttattgataataaccaatacaagacaagtcagacacgtggattaaccacacaacaaagtaacacggcatttgatgtgaagagtttggaaagtggcttattaaacatttctaaaaaacaattccctactgataaatacctctaccaagaaggtcaaaccatcaaaacggcggaagcgcaaaaatggttggcacgtcaatcaaaagataatacacttggcttaaatccagaagataatggtgaaaaagaaccggataagcggaatccactgtatctccaacaaatcttagaacaagacttcttaggggcagatggtgcgcttgaagggatgagtattggtcttgggatgaatcaagtggattactataccaaggaacaatatggtgctacttttgaaaccaaaatttctagtgccatgatggcgcaacaaggtaaacaaatggccaataaggtcttaacgcgtttacggcagaaaaaaggtttgagtaagacaaccatcgtggtggggctttacaaacaagcacctaaggatagtttagtgggcggaaccttcttcgcttatggggtcagcaaaaacggtagtacaacgattgattcatggcacaaaatgaaccaagccaaccaagttttcccactcgttaatgatgaaaaagcggtcaatcaaagtgatgcggacgcgtttactagttttaaagaacaagtccaaaccttcttcccgaacttgagtggtgtcacggctcaagcacactatgaagatggtgtattggctgggatgaacatcaccgttaatacacaattctacagtgaaacagaaatcatgagtttcacacaatacattgcaaccgctgctgataaatatttaccacaaaatattccattagatatttcaatctcgtctgcagaggggatgcaagcttacgtaggccgagcagccggcagtaaaaggttctcaacccacgtattcgggagttattaattaaagagtgcgacaacagtcagttatgactgataggcaaaaaaatagcgtcgacaactaacgcagttgtcgacgctatttttttggacctttaaaagtcagtggttgtaattttaaaaataacagtgtacaatatgcgatattgttgttattttatttattacaccaaaggagagcagcatgaacgagtttaaaacagcacggaattggctagacaatgcggatgccgtcattattagtgctggtaatgggctatcaattacggaaggttacaatatttttgcacacgacgaagcgtttatgacccactttgggactttttatgaacgctacgggattatgaatattcttcaaggggctttttacaactatccaacagtggctgaaagagatgcattttacaaagtattgttcgattatatggttgatcactatgaaagtacacctgtctttcgcgatttaaagcagttggtgggcggtcatgaatactttgttgtcacatcaaatggcaacatgcattttcaactgagtggatttgacgaagaacggatttttgaagtggaaggtaattttggtaacaatcaaaatccaatgccgatgattcaaaagcaacaagctaagtttaacgcatttgttcaaaagtatcgttcacaaaacgtggtgattctggaattaggaattggtgctaataatcagttaattaaggcgctcctcatgcaattggtggcgcaaagtctaagttaccgttacatcacgttgaatttaccgcacgaaatcaatattcccgcagccattgaacaacggtcaatcggtcttgctggatcaatcgatgataattttaaggagctcctcaaaaatgactaatttagactatcaagcaacactacaaaaaatggcaacgacgctcaaagaggcagattacgtcatcgtgggagccgcagccggcatgtcggctgcggctggtcccgattggtataatcccggcgatttatggggctttaagctgtctttaattcattttgttttacatgaaccagtttaccaaccgtatcaggacttgaaagccattttaaagggtaaagactatgatttgataacgacgaatcaagacgtgcaattctcgaaagcttttccagataaagatgtcgccacgattcagggtgactggtcctattttcaatgtgccgataaatgtcatgatcaagtctatcctaatcagacagttgttgaccaattatttccgcaaattgaaaatggccatttacccgaaaacttaattccgcggtgccctaaatgtggtgctgaaatgttggaatgggtccgtggttatgaattccttgaaggtcagcactacaacaatcaatacgcaaagtatcgtcaatttattcaaaaagctgaaggtaaaaaaacggtctatttagaactaggtgtgggtatgatgacaccgatgtttattaaggaaccgtttatgaatctaacgtaccaaaatccacaagcaacatatatcaccgttaatcccaaagatgcgattgtgccacgtgaattaatggaccgcggtattgcagttaagtatgacttagtaaaggtactagcaaatctaaaagagtgcggcatcagccggatatccgctgaggattaacacagaatggtgaataaccgggttagcgattgtttgccattcagggttaaccggaagcggttggctgatagagcacgtttaaaagaaaagagtgcggcatcagccgggtatccgctgaggattaacacacaaaaaggttgggcaatttacccaacctttttgtgtgttagttttcgtaaagttttaattctggattttcaacgagacgttgttgatattgttcgataatgtcggctagtttgatggcttgcatttgctgttcagcagtttcttggatttgatcgtaataggtagcaagcgataattgaatattttgtccggggccgcaactaggatcaatttgggtatcgatgttcaataaccgggtatcatcgacggctttatagatatcacagagcgaaatttggtcaggagctttcgttagtttgggttcggcatggcccttaacgctcgtcaataggccagctgtcttaatttgccccatgatttggcgaataaaagaggggttagtattgatgcttttagcaatgcgctgactagaaaggttatcaaacgggtttaaagcaatcagggtcatcaggtggacggcattgcttaaacggactgattttttcatgatagactccttttaaaaagatgttattaagagtataacacctattgaggtgttctgctgtaatcaggctagccagagtctgccgtaaatgaaaattacatgaagggagttcagactggataccgataatacagcccgataatcaattaagttgcttctatcagtaggtttgggttcttttatgagcatgaaataagttgtgaaatgtctattaaaattagacttatttttgaaaaatcattaagcaataaaaaaattcacccaaaattttgggtgaactcatcaaactttaatgaaattattttagcagtggagtggttataaacgtttaaaataggaaaaaaacaattctaaatagtttagtaacttctagtatgggtaaatccgtaagttacaccgacagactattgagtgttgcttttgaaactactcaaaactggggacgcttggttacgatacttgccgcttagctaatactgagtgttatttgttaagttggaaagccttagtgattaagtcttccaatgatgacatgatttgattgctagcccaatctgttgtgagttgtttgaaagcaattgctttttgatcgatgtcatgtttcttaggcattggtttgaagttttcggctggttggtcttcttcaactgctgtttcttcaaattgttcaggtgctacttccggtgcggctactgtttcgtcttgaacttctgcgggggcagttgtgcttcgtgagccatctgctgattcccagtagtgagttgtttgaccgccaattgtttcggtaacttctacaggttcgctgtcatcgatttctgtttgtaaccatgcttcttctaaagcggcttgttctgcggctgcttctttggctttagcggccattccaggtgttacaccagtgatagttacaccaaccgaagtggtcgctgctgaaacggtcgtactttgtaagacaatgccacccattaaacttaaaactactactgctacaaggtgttccgagatattgattttcatattataacactcatctataagttaatgatagtcttgtacattattcacaacttcttatctgtattcagtatataagattaaacgaatgcgtttatattataaactcttataaatcatatcgccttctaatgaattgcataacattcaattacgcttttaaaaagaaagtaaaaatatatttcaatatctgctgaaaccggtaaagattaggaaaaactggtaaatttcaagggatgtcactttcttatacgttaatatatggtaaaattaatcagaatggataaaagtgacagaattagaagaggggtttactcatgattgataaaacacaagttcagcatgtcgcagaactttcaaaactagcttttagcgatgctgagttagaacaatttactgaacaacttgcagacatcatgaaaatgactgatgaattaaataaagttgatacaacgggtgtcccagtgacgacccacgtgaataaccttcaaaatattgtccgcgaagatgtggctcaagctggcacagatcgcgagattttaatgaagaatgcaccagattcagcggacggcttattgaaagtccctgccattatggataaggaggaagactagccgtgaactacttatatgaagatttacaaagtatccatgccaaattagtggctggtgacttaactgctagccaattggtaactgaaacagttgctgaaattgacaagagagaaccacaagttgatgcttttttagcaatcgatgaagctggtgcacaagctgcggctgccaaagtggacgcccaaccaattgatgcagataacttattagctgggatgccaatcgggattaaagataacttattaacagatggcttaacaactactgctgccagcaagatgcttgaaaatttcacgccggtttttgatgcaacggttgttgaaaaattaaaagctaaagatgcaattgtgatcggtaaaaacaacatggatgaattcgcaatgggttcatcaacagaaacatcagccttcaagaagacaaagaacccttggaacttagacaaagtacctggtggttcatcaggtggttctgcagcagcagttgcggccggtgaagtcgttgcttctttagggacagatacgggtggctcaattcgccaaccagctgcatttaatgggattgtcggcatcaaaccaacatacggccgtgtgtcacgctggggtgcgatcgcttttgcttcaagtcttgatcaagttggggtctttagtcggacagttgctgataatgcgactgttttacaagccatcagtggtcatgatgaaaaagatagtacgagtgctgatatcccagtgcctgatttccgtgccgctttaaatggtgacatcaaaggtatgaagattgctgttgccaaagaatacatggcagaaggtgtcgaaccaggcgttaaagcccaaatcgaaacagccattgaaactttgaaatcattaggggcaaccgttgacgaagtcagcttgccaaattctaagtatgccgtccaaacttactacattatggcttcaagtgaagcttcatctaacttgtcacgttttgacgggattcgttatggttatcgttcacctgaagccaagacacttgaagatgtgtatgttaaatcacgttctgaaggtttcggtgatgaagtgaaacggcggattatgttagggacgtttgccctttcatcaggcttttacgatgcttacttcaagaaggctggtcaagtgcggacattaatcgtgcgcgactttgaaaaagttttcgcagactacgacttagtggttggaccaacaacaccaaccaccgcttttgacttgggtcgcaaagtatcagatccagtgacaatgtatatgaacgatatcttaacaattcctgctaacatggctggcttaccagcaatgtcagtgcctgccggcttagtagatggcatgccagttggtttacaaattattgggaaagcatttgatgaagaatctgtttatcgcgcaggttatgcctttgaacaagcaactcaatttaacaagaacgttccaagcttcaaaggaggaaaagcctaatgaatttcgaaacaacaatcggacttgaagtgcatattgaattaaaaaccaattcaaaaatgtacagtccatctcctgtaaactatggtgcagaaccgaatactaacacgaatgtgattgactggggttatcctgggacattgccaaccttgaataaaggggcatacacacttgggatgatggttgcgactgccttgcacgctgatattgcgcgcgatacgcatttcgaccggaagaattacttctatccagataatccaaaagcttaccaaatcacacaatacgaacaaccccttggtaaagatggctatatcgaagtcgaagtcgatggccatacaaagcaaatcgggattgccgaattgcacgttgaagaagatgccgggaagaatacccatggctctgacggctattcatatgtcgatttaaaccgtcaagggactgccttgattgaaattgtttcaaaacctgatatgtcaacgcctgaagaagcctatgcttaccttgaaacgttacgccaaattgttcaatttactggcgcatctgacgttaagatggaagaaggttcaatgcgggtagatactaacatttctgtgcgaccaatcggtgcgaagcaatatggtgtgaaatcagaattgaagaacttgaactcctttaatcacgtccgtttggggttagcttatgaaatcaagcgtcaatcacaacttttgattgctggcgaaacagtgcgccctgaaacccgtcgttttgacgaaaaaacaggcgaaacattcctcatgcgggttaagaccggtgcggatgactatcgttatttcccagaaccagatctaccaccattacacattggtgatgattggttacaagaagttcaagacaatatgcctgaaatgccggctaaacggcgtgcacgctatgtggatgaattgggcttgcctgaatacgatgcgggtgtcttgacgaacaccaaggaaatgtctgacttctttgaagcagctgttgctgatggcgccgcaccaaaacaagtttctaactggttgatgggtgaagtgaatgcttacttgaacgacaaacaaattgaccttcaagagacagccctcacacctgcccacttagcccaaatgatcaatttgattaaagacgggattatttcatcgaagattgctaagaaagtcttccaagaaattatccaaaatgacacggatccaaaagcctgggttgaagctaaaggcatggtccaattatcagaccctgctaagttgacaccaatcatcacaggtattttagatgacaaccaacaatcaattgacgatttcaagaacggtaaagaccgcgcagttgggttcttagtcggtaagattatgaaggaaacacggggtcaagctaatccgaaagttgtcaatgacttgttgatggccgaattgaacaaacgataattgatattttaggagattcgaatgcaaaaacgtgcacggttaatttataatccaacttcaggacatgaagtgatgaaacgtagtgtcgctgatattctggatattttggaacaagcgggttatgaagcgagtgcttttcaaacaacgcctgaagaagcttcagcgcaaaaagaggccacaagagcagcaaaggcgaacttcgatttaatcgttgccgctggcggtgatgggacaattaatgaagtcgtcaacggcattgccggcttggaaaaacgcccaatgatggccgtgattcctgctgggacaacaaacgattatgctcgggctttgaagattccgcgtgataatccggttgaagcagcccgcgtgattttgaagaaccaaacgcttaagatggatatcggtcaagccaatgacaattacttcatgaacattgctggtggtggtttgctaaccgaattgacctatgaagtcccctcagactttaagtcaatttttggctatctcgcgtatgtcgtaaaaggtgctgagatgttaccccaaattaaaccgattaagatgcatctggaatatgatgaaggtacgtatgatggggaagcttccctattcttactcggtttaaccaattcagttggtggatttgaacagattgcgccggatgcacaactgaatgatggtaatttctcattgattgtggttaagacagccaacatggccgaattagtccatttaatcgcactcgtcattaaaggtggcaaacacgttaatgatccacgggtcatttataccaagacgtcaaaactagttgcgcgtcctggtgatgatgacgttaagatgatgattaatttagatggcgaatacggtggcgatgcaccaatgacctttactaacttgcaacaacatatcgagatgtatgtgaataaggaagatattccagatcacgctattacatcagaaacccctactcagcagtctgccgaagatttattcgtaaaggaagtcgaagcaatttctgaagaagacatagacggcgatggtaaaataggttaaactggaacattggataacgtgggcggattgaccgcacacttgtagctaagaaaagagtccgaagcaaaactcagttttgtctcagactctttttacacaattaaaaagaggtaactatgaaaatacaagcacctgtaagaaaaaatgaaacattgacggttgatattatggatttaacctatgaaggcatgggtgtcgctaaagtcgacaactatccgttgtttatcgaaggcgttttgcccgatgaacaagcagaaatccaagtcacaaaggtcaataaacaatatggttttgcgcgcttagttaatttattgaagaaaagcccagaccgcgttgaatcaaaagctaacatttactcacaaactgggattgcgccattacaacacttggcatacccagcccaattagatttcaagcgtaaccaagtcttgaacgtcttccaaaaagcccatttagatattccagtgcaacctgttttagggatggatgatccaacaggttaccggaacaaggcgcaagttcctgttcggtttatcgatggtgctttaacaactggtttctaccggaaacacagtcatcaagtgatgccaatggaagacttctacattcaagatcctaagattgatgaagctatcaaggtcattcgtgatatcttgcgtcgtttctacattgatccatacaacgaagatacgcataagggtgttttgaagaccattatggttcgccgcggttattacagccacgaaatgatgattgtcttcatcacgcggagtaagaaattaccggctgcccgtgaaatcgccgttgaaatcaaaaaagctttaccagaagtggtcagcatcatgcaaaacgtcaatgctgctcaaacgaacgtcatctttggtgacgaaacaaaattaatcgctggccgcgactttattcgtgatgaattaatgggcttgaagttcgaaatttcagcgcaatcattctaccaagtgaacccagtgcaaacggaagtcttgtataacaaggcgatcgaagctgctgaattaacggggaacgaaacagtcattgatgcttattcagggattgggacgatttcattagcagtcgctaaacatgctaagcaagtttacggtgttgaagttgttgaatcagctgttatggatgcgcggcacaatgccaagattaacggcatcgaaaacgttgaatttacactcggtaaagccgaagaagtgatggcgcaatggcaagcagatgacttaaaagtcgatgctttgattgttgacccaccacgtaaagggttggaaactagcttcattgaagccgttggtcaattaaaaccagccaagatggtctatgtcagctgtaatccagcaacattggcgcgtgatttagaactattggcagcccaaggctaccaagcagaaagcacacaaccagtcgacatgttcccacaaacgctacacgtcgaaagtgtcactaaattagtattaaaataaagtgcgtttgtggcggttaacttctgagtatagcctaggctggcgaataaccaacaagttggtgatttgacagacgtagctagacggaagaagttgccacaaaaagcacgtttcaaaatagagtgcgtttgtggcggttaacttctgagtatagcctaggctggcgaataaccaacaagttggtgatttgacagacgtagctagacggaagaagttgccacaaaaagcacgttttagcgggtcgttattatccagagatggaaagtagcgacccgttttttgcgttcagacgtgcatttaagcggaaggtcggctagaatgaaattatcaaaacatgtttagagggttaacgcatgaatgtcaaaaaacaatctataatgatgcgcttagcgcaacattttaatcgattccaatccgcggcggtctatcagattatgcagcgaagtttaatgttgttatttccatttgtcttgattgggagtatcagccaactcatccaactagcactttttaaccggaatagttttgttgtgaatgtatttcatctttcgaattggttgagtaaacggaatatctttcagatgatgtttgacagcattacgagtttgacgttaggaatcgttgcggcattagcagcgatgtgtgcggcgcgctatacagccaagcactataagcgtgatgaacaattagccagcattacggggcttattgcctatttaatcttagcgttacggttgacgccaaatgagggcttatctttcaacagccagatgttgggaatggggggcttattttttggcctattagtcggctatctgactggattagccttcaaaaaattaggacgacctcatcggcgcgatttaccgctgaatgggtcagcggtaggacgttcattggattctatgtgggcgattttattggtgctcggcgtcattttagggctgagtatcctgctaaattggttggcgatttcaatcttgccagatcaagtcatcttacgattacaatcactaaaagcaaatcaaacgggtctgcttttcacgttggggactggtttagcggccactagcttaactttttttggattaacgagtatgccaacattggcccaatttgggcgtgagggaatcgcatcttcggccaacttaaactatgcgtttagtcatcacacggcttggcacgttccatatccgttcacgttagggactttgtatgaaccctttggtgcgattggcgggacgggtgggacattagccttagtgattgccgttttcatcttcagcaaacaaagggattatcatttgattggtcgatggtcgttgttgcccgttttatttaactttaatagcgcggtccttgtgggaatgcctgtcattggaaatggcttgtatgtgattccattcttattggtaccactggtaaacatggggattgcatcggcagcagttgcattgaatctcatgccgtcggtagtcttcacggttccacttgggacccccggcttattgcaagcgttcatgggcaccaacggtgatttagtcgcgctggcggtgacggtattaaacgttgtcgtcggcgtgatgatctacaagccgtttgtccaattggcagatcaattagcactcgtaaaggaggcggcataaattggccaaattaagaaaaaaaagcctctggttgttagtcattagtttggccttgatcggcggattaatgtggccagctgctcaatggagtcgccagagcgtgatgaccttagctaagcgccatgattcacgaatgtcaccggtaatttttattccagggagtagtgcaacccaaaatcggtttgatgaattagtggctaaattgaacgctaaccgcgggaatcggcacagcttgttaaaactaactgtgcatgaaaataatcagattagctattcaggggaaattaaaccgcgggataatgaaccgtttatcgtggttggttttgaaaacaataaggacggttatagtaatattcaaaagcaagctaaatggttttcgctcgcatttaccgcgttgactaagaagtatcaatttaataactttaaagcggttggccattctaatggcggcttaatttatacagcttttttagaagattattttaatcgcgatgatattacagtgaagaagttgatgacgattggttcgccgtataacttttccgaaacatcgattacgcataagtcacagatgctgacggatttcattaagaaacgtaaaaatattccgacgaacttatcgatgtattcaattgcgggaacggaaaactttgaaaatgatgggattgtacccgcgcgtagtgtagaggcggggaagtacatttatcaagggcaagtcaagcactacaccgaaattacggtgacaggtgaccaagcacaacactctgatctaccacagaatcaacagattgtggccttgttagaacaatacattctcagcaaaaagaacacccgcaatacacaaccaacacctaaggattcaacaccttcagaggaccaataaaaaaagccccagaataacagtaaggttgttattctggggccttttttattggcattcattaattagaatgcttggtactttctttttgaaccagagcaccaattgctggcaaattacccaagctatcgattgacttatttggcaagacaatggtgttattttgaccgtctgcgatgtgttccatcgcttcaatattcttatattgaagatagagttcgccgttattgactaagctggcattgatcaaattaatttgatctttaacagcttcggcaattgttcgttcactttgagctttcccttcagcttccaaaatttgtgtttgtttattggcttcggcttctagaatattcgcttcttttaatccttcagctttacgaattgcggcggctttgagcccttcggcttccataatgttggcttctttttcacgcgaagcacggagcaatttattcattgattcttggatgtcgtgggccacttgaattgaatcgatattgacccgatcaacgtttaagccgtagccggctgttacttcgctaagttgttcaaaaagggtttggttaattttttcggtgccatttaaaacatcgttcaagtccatgttcccaataatcccacgtaattgtgcacgggtgtcttggaccatacttagaacggaatctttatttttataaacgtacgcattgacgtcagtgatgtgatatttaatcgtttccgaaatcataacaaccacgttgtctttggtaatgacttcttgttcagcgacttttaaggggatttgtttcatattaacgatttctgtgatgtgataaatgaatggaatgaccaaatggaaaccaggatcaagcgttttaacgtagacccctaagcgttccaaaatcccaacttccccggtatgaatcaaggcaaatgatgaaaagagggtgactgcaacaataactaaaacaagaatgactaaaatactgatgaaaatacccataataaaaactcccttttgtctggcttaatacgccagaatattgtggtgcgctgtcacgattaaagctaaaggtgtgacggccgttaccatgacgagtaagccagcgctagctggtccttcgacacggtaatgatataagatgccaaaaaaattaacggtgccggttgatttagcatcctgtaaagtaaacgttaaccccactaagcgttcatctaacatattccgcctccctttgttcacattgtatctgattaccaataaaaggcaactctaagtgacagtaacgaacaaaattgttaggtggcttgtctcgaatgcatgaagatagtaaactaagcgtactaaggctggaaatggaggaaccgtggatgagacgaaaagtgacgccgatttttcaagacagtttccaaaagcgctattggcgacaaataattatcggcattatcgcggtagctctgtgtcttggtggtgctatctggtggttgaaacaccgttcggatcgaccaagcgcgacgcaatatccgattctagggatgcaattaagtcagtcagatggttaccaagattttgacgggttaaaaaaggacggtattcagtttgtttatttaaaagcaactgaaggggccagttacaaggatgataatttcgacaccaattacagtcgagcaagtggcactggcttacgcgtgggcatctttcatttttttagttttgatagttcgcctgaacgccaagctgaccaactttttaaagcagttggcagccagacgggtgatttaccaattatgatctatttggattattataacgactatgcacaacaaccgcccgcacaaaagaaaacgcaaatggcactggcgcagctagtgaccttgattaatcaacattatcatcaaaattgtctcattggtggtgcacccagcttattaaaacggtatgtgccacacaaaggagactatccattgtggcaaactacgcgggaacagccaacattggcgactaagaacgggttctggcaatacacaatggctagtcagattccaaacagtgataatcagacgaactatcagttagcagtttttactggcaccaagcaacaatggcagactattaaatagaaacggagagaaaataatgattaaacacaaaggctggttattattaatcgcaatcgtggtggttttcatcggtggtagttggggaattcatagctattattacggtggggaagcctactatacacagattgtttcaaacggaacacgaatggaagaaaaggattcagcaggggaaacggttatcgattataactatcaacaagcagcctacaatgaagatggtgttaccaaaaaagttgattttaatggtaacaaatcaacgccgcttaaacgaaatgcgtacctcaaattaatcgtcaataaaaataagggtgtggtttcatgggaaaaggttgccaaaaacgaagtcccagataaagctcaaaaaatgttgaacaaataaagaataactaaaaaggcccataacgctaagcgttatgggccttttttaatagctattcgattggataatccatatcttcggcttcatcgtaaattgaaacgggccgttgattttcacaagtaatttttaattgatagccgtagtgatcgagaaagaccaattcgttttccgtgagggaaatgacttgaccactcaatggcttatgatcgatttgcaccaacaagttcggtgtaatttctaatgtgtgtttttttcgggtttggttgtcattaaaagaccagtgtccagcataaaaagtcgctactttactcgcttgagtcgtccgaactttttgctgatactggtgaatggttcgatttaaaattgcttgtggtttttgaaatttaaaaaatcgcataagtcacaccccaacttactattattctaccacgaaatagttagtttgcggacaattaattatcggacttacgactggttttttaaggaatggttaaagaagtgaatagtggcggaattcttatcagtagaaaaacttttcgataggcttttagatctaaatcccgtatactggcagtattaaataagggagctgattataatgcaaacacttgggattattgggactaactggattacgggacaatttgttgatgcggcccaggaatctgaatcatttaagttaacagctgtttattcacggacggcagataaagccgaccaatttaaaacgaagtatcacgcaccagaagccacaagttacactgacttagacgggtttatgaatgccaatgaatttgaaaccgtctacattgcatcacctaatagtctgcactttgaacaagcgaagcaagcaattttagcgggtaaaaatgtcatcgtggaaaaacctgccttcagtaatccggctgaaatggcagccatgcaaacattattaaagcaacatccagaccaattcttattcgaagcagcacgtcatattcatgaggccaactttaagattgtacaacaagccatcaacgcattaccggcgatcaatggcgcgaccttgagctatatgaaatattcatcacgctatgacgctgttttagcgggtgaagaaccgaatattttctcaccacatttttctggaggagctttacaagatctcggcgtgtatgtcgtctatgatgccgtcagctggtttggtgtgcccgattcagtcgattatcaagctgaattgttaccaactggagtggatggtaaaggggtcgcaacactgtgttatccaacctttaacgtcacgttgatttttggcaaaaccgttgattcctatctaacgtctgaaatttatggtggccaaacgacgattgtcctcgataatgccggcacaatcggcagtgttgaccgctacagcgaaggtgggcaaaagattgagtcactaggggaacaatcacttgctaatccaatggttgctgaggcagaaaatttcgcggcgatgattgctaatcgtgacacaaaacggtatcatgaattattacagctaagtgaatcggtcaaccaagttttatatcaattaagacagtcggccggaataacatttgatgcagattaacatgacggaggcaatacatgagcgtttcaccactatttcaagcactatgggatgaacaaggatttacagaaatgtcacccatccaagaggcagtttatcaaccactgaaaaaagaccaatcaattctaggactggcacccacgggttctgggaaaaccctcgcgttttcattgccgttattagaaaaaattatgccgggcgaagggctacaagtcttaattttggccccttcacaggaattggtgatccaaacacgggacgtcattcaaccttatgccaaggcaatcgactgtaatgtccaagcgattacggggaaggcgaatgttaaacgccaaatcgaacggcttaaggccaaaccagagattatcgtggcaacgactggtcggttattagaattgagcgaacaacggaaagtgaaattccatacactccaagcgattattatggacgaagctgacgaattattgacggatagcgggctttcagaaacccgccatatcgtgcaagaatcacctgccgatgtgcaacttggcttcttttcagcgacatcaaccgatatcttattagagttggaaacatggttcggcgtgccaatcgaaacaatcgacgtgcgtgggattgataagacgggtggggaagtgttgcatgcatttatcccaactggtaacgctcaaaaagtgaacgtcttacgccatttagcacatcaaaagaattttagaggattggtcatttttaaccaatccgcgcaactcttacaagctgcacaaacgttaaaacatcaaaaagtaacgtatgccgcactctcagggcaaggtcgccaaacagaacgccaaaaagcgctcaaagatttccgtgaaggtaagattcaactcttactagcaacggacgtggctggccgtggcttggatatcaccgacttaccttatgtgattaattttgatgtaccaaacgcaaaaatcacttacattcatcgtgctggtcggactggtcggatgggacgcacggggactgttttgacgttgggcaatcaacacgatgggcggaatttgcgtaagttattggcgcctgaatatgatcttgtgacccgttatttggtcggtgaccatttggaagccgaaaaaccagtgacgcctaaagtagcaccagttgctgcaacgaaagcaacatctgctgtaccaactactggtgaagcaacagaaggacaagtacaaaaggctacgccgacgacaagcgcgcgcaaagccaaattagtaccagttcgccaacagccagctgcaccattaaaaccaaaacataagaaaaatcgtaaacgaaatcaaaagaataagggctaccataagaaaaataatgactagtggtctaatccagattgagcgagaaaccttaacaacctgttaaggtttcttttttttggactagtccgtttgtgaaaaggttatcagtaattaattgacaaatctcaggaagcgattacaatataagtaagggttttctttcgcttcgtaaaatgcgatagtggcgaactctcacaatcaggaactaatttttgaaagccttttaatggattggttagtcattctcgaagaaatatctagaccaattaatgaatggttacgaaagtggttcacgatgagatgatcataggaggtgccatactatggcagaagaacagaacttagaagcaatcatgggcttaattatcaacggtgggaacgccaagagtagctcaatggaagcaatcatggccgctaagaaaggtgacttcgaaacagcagctgccaaacttgcagaagcggatgctgctttatcagaagcccataattcacaaacagatatgttaaccaaagaagcaagtggcgatcacatgcaagtgacattattgacggttcactcacaagatcacttgatgaacgcaattactttccgcgatttagcaggcgaagtcgttgacgtttacaagaagatggccggtgtaccagtcgattaaagtttggctaatgaacaaaagggctaggacaaaatgacttttgttcgagctctttttagttaaaagcaacaaatggcacattgaagagaagagtgggaacgggatggaaattaaattaaatttaaaaatgccagctagttatttttatcagaagattctggaatcagtgttgtttgatattaagcaacaaactggggataaactaactgaagcgcagttgcctaattattcgtacgacaagcaatttggcaagaatcgggcgacactgaagattacgcaactgattaaagatcagagctatcactacgaaacgacttctacccgggggagctatcaatcaagttacgatattttcgcgaatggaccgcagtctattgaagtcatctatcgcgaaaatgccaaagcaaatggcaaattacaacaaaccaatgatatgttgatggcctttgtcatgggtttcatgcgtaaacgcggctttaagaaaatgttgaaacaaatcgaaaaagcatatcaagcagaacaataagcaatgactttgagagaaagtaggatgaccagtaatggaataccatcaattagcaccatttcctaaagattttttgtggggttcagcttctgcggcctatcaaattgaaggggcctaccaagaagatggtaagggccgttctgtgtgggatgaatttgtccgcattccaggcaaaacgttcaaagccacgaatggtgatgtagcggtggatcactatcaccgtttcgaagaagacgtggcgctaatggcacgcgctgggctcaaagcctatcgtttttcgatttcatggccacgggtcttaccaaatggtaaaggcgctgtgaatgaggcgggcttagccttttatgatcgtttaattaatacattaattgccaatgatattgaaccaatcgtgacaatttatcattgggacttaccgcaagcgttgcaagccgaatatggcggttgggaatcgcgtcaaattattgaagattttaccaactacgcaggcttattgttcgaacgcttcggcgatcgtgtgcaacattgggttaccttgaacgaacaaaatgtcttcatcactcacggctatttaacagcggagcatccgccagcagtgactgatgctaagcgaacttatcaagctaatcatatggcaaaccttgccaatgctagtgcgattaaattattccatgaaaaaggctatcaagggggcatcggacctagttttgcctacagcccaacttatgcgctgaatgcggacccagaaaatcaaattgcggctgataatgccgaacaaattaacgctgatttgtggatggacgtttatgcttggggccgttatccgaaattagtgatgacttatctcgaacgaaacgggattgcacccgaaattactgaagcggaccaagctttattagccgatccactcgcacatcccgattttatggggttgaattactatcagacgatgacggttacgactaacccactagaaggtggcgttggtttgaccaagcaaaatacttccggtaaaaagggcactagccaagcaagtgggttgccaggcgtctacaagaccgctgataacccctatatgcaacaaactgactgggattggaatattgaccccgaaggacttcgaatcgcactcagacgtattgagagccgttatggactgccggtcttaattactgagaacggtttaggggcttatgacaccttgaaagaaggcgggcaagtgcacgacgactaccggattgcctttttaaaggcgcacgttcaagccattcacgaagctattaccgatggtgtttcggtcatcggttacacgacatggagcttcacagatttattaagttggacaaacggctatcaaaaacgctatggcttcgtctacgtggatcgcgacgaaacagaagaaagagaactaaaccgctatccaaaagacagtttctactggtaccaaaaagtcattaaaagcaacggggaaatactatagagtgcgcaattcagcgtgaatttgaccgtcttttttgtttgattttaaagtaatggcataatcattgtcgtccgtagccagctcagtggcatgactaagatcattgctggtatcatgtctgcaattggaaattcgcgaattttagcaattctaaagccagtggcgagcatcaagaggccgccgcaagctttgaaatctgcaagcattgttggattcgttagtgggaaaatgagtttggcgagtaagaaaatgatgtaaaagataatgaattgcggaatcgcaatggttgaaacgacggagccaagattgcaggcaaagatggcaggcaaagatggcagcagtaaagaaatctagaattgatttagaaattagaatcgtattgttgcctgtcataccagcatctaatgtcccataaataccggtcccaccggcacaaaagaggacaatcactgtcacgagtgctgaaataaattcggtatctgatagcgtattgtttttacgcggaaaaatttagaaattggccgttccatcaagacggcaccgcgatcaatccagcgaccgaagtgaatgagtaggccaatcccagtaccgagaacaactgcgaagatgactgcaggcatgttcttcatttgaataatggcattgatgcccattcccatcgaagcaacaccgaagattaaggtgagttctgttttaaatttagttgataatttatctcccaataaactaccgaatagaccgccaaataagacggataatgaattaataatcacgccagttggcattgagaagacccctttaattttaagtttgcatattcaaccataccaatttaaaagaaaagaatcaatttaattttaaatgttagcgcttatatatattcgatgggagtcttgagctagaccaaaaaacgactaatcatttgattagtcgtttttttactgactattcgaatcgcaaactaggcttaaaacgccgaatcagtgccttgggttggttataggcccaatgatttaaaacggcggcaatcaaaatacaggggacgatatccttttcttggttgacagtcaattgaaaggctggaccgctgcttgctagaatggtggtcgcttgcatgatgggttgtgtatggtagataatgcgatattgattttgcgttaaatctcccataattaaccaattaagttgtttgacatagataaactcatgccagacgccccagatctttttgagttgaccaatccgttcatcgttttggaaaaggtcaaagtcaggtgaggggctaattgtgacttggcgaatttcaccgagtaagtcgccggtgagtgagtaaaggctgaatacgtcatgccgaatcccacgctttccaataagtaaataacgcggttgttcttgatcgtcaatcacggttgagacaccacgtgaagcactagcctggtgtttaatgtagaaaataggcatcaaagatcacttcttttcagctgtacgattcaagtcaatcgcgtgataaatcgcttgtgcgacgccgtcttgaatgttagttgcagtttgatagttcgcaagttccttaattgttgggacagcattgcccatggcgacaccaatgccagctgttttgatcattgaaaaatcgtttaagttatcaccaattgccattgtttgctcaactggaatccctctttgttcagcataggcggccaaagcgatgcctttttgagcgtcaatgtggtttatttcgatgttattacttgaagaggaagttacaactaaatccccgcgggcttcacaaaatgccttaattggtgctaattcggtcattccctgtgtgctaaaagcgatgattttaagaatcttaaccgttggatcgttaataatcccttgatagtgatcatcgacgtagttaatattcattaattccaaacgggctgctgctaaagcaaccgcaattttataactcgtatcgggattgaggttgacgagtaaatcagcgacattttggatgcgactgactttgctatctgaataattaccggcagtcgtcatgagttcgaagtaaatattattttcgcgtaaattttctgtgacggctgtcaccctttcggaatcaatcggcacattcaaaacttcattacctaaagaatcaaaaatttgggcaccattcatcgtaattaaagtaggttggatgtcatcactgtcaattagggggagggcttcagaacgactgcggccggtagccaccacgaattcgatgccggcgtcttgggcagctttaatggcggtcatgttaccgtctgaaacctgcattttgtcgtttaataaggtaccgtccatatcagatgcaataattgaaatcaaaggaattcctcctgaaaacgtattattagaaacttacctctatcttagcatgcaagctacttttcttctagcaacttatgttaaaacacgataaactagttaatgaggtgagcagatgaaaacaattattcacaatgagtggcaaacgattctcgcaccagagtttgccaaaccctattatggtcagctccatacctttttgaaacaggaataccaaacgaccacggtttatccagagatgcaccatattttccaagcctttgaatggacaccgtttgaacaggttaaagtcgtcattttaggacaagatccttatcatggcccgaaccaagcccatgggtgtagtttttccgttttaccaggggtcaaagtcccaccatcattgcaaaatatttataaagaattgcagacggatgttggctttcaaccggttcagcatggctatttaaagagttgggcggatcaaggcgtgttcttgttgaacaccgtattgaccgtgcgggcaggtcaatcaaattcgcatcgtaaacaaggttgggaacagctaacggatgcggcgattgctgcattgtcaaatcggggacatgtggtcttcattttatggggaaacgcggcaaaggataaacggcggttaattgatgagacgcaaaatgcggtcattactgcagtacatcccagtcccttgtcagcctatcatggtttctttggctctaaacctttctcacagacgaatactgcccttgagcaatggggcatggcgccaattaattggcaattaccacaaacagtcacggtagaataatgaagcgttaccattgttgacttgtcgcggtattagaaacgttgtatgattacattagcaataataaaatgcttactggaggttgcaattgtggatttatttgaaagcttaaaagcaaagattaccaatcggcaatttaaaattgtttttccggaaggaacagaaccaagaattattggtgcagcagcacggttgaatgctgatcggattttgaaacccattttaattggggcaacgaatgatattcaacaaatcgctgctgctaaaggatttaacttggacgggataacgattattgatccacaagaatatccaacagctgactttgaaaaaatggttgccgcttttgtcgaacgccgcaagggcaaggcaacccctgaacaagcacaaacaattttacaagatcctaattattttggcaccatgctggtttatttaaacttagccgacgggatggtttcaggtgccgtgcattcaacaggcgatactgttcgaccagcattacaaattattaaaacaaaaccaggtgtccaacgcacaagcggggccttcattatgcaacgcggtcgcgataacgaacgttacttattctcagattgcgccatcaatattaacccgaatgcgcaagaattggctgaaattgctgtggaatctgcaaagacggctgagttgttcgatatcgatccgaaagttgcgctgttgagcttttcaacgatggggtctgcgaaagcagacgaagtcacgaaggttcaagaagcagcacggattgcacatgaaattgcgccagaattagacattgatggtgacctacaatttgatgccgcatacgtaccagttgttgcgaaccaaaaagcaccagattcaaaagtggcgggtcaagccactgtgtttgttttcccagaattacaatcagggaacattggctacaagattgcccaacgttttgggaatttcgaagccatcggaccaattttacaaggtttgaatcaacccatttctgatttatcacgtgggagcaacgaagaagatgtttacaagttagccatcattacggctgctcaagcattacaaaactaattgaccgacaacaaagacgccagcacagaaaaattgtgctggcgtctttgactttgcgaacagggcttttttcggtataatgacacacagataacaattagaatgaggcagaacatgttagaatttaaaacaactgatccagaacaaacaattgcgattgccaaacagttgggccaacaagtccaagccggtgatgtcttgttgttggatggtgatttaggcgctggtaaaacaacgtttacgaaaggcttggcagctggtctgggaattgaccgctatattaagagtccgacatttacgttaattcgtgagtatcaagacggtcggttaccactctatcatatggatgtgtatcgattggaagaaacgggcgccagtgatttaggcttagaagagtatttcgatggggacggggtttcggtggttgaatggagtcaatttattgctgaagaactaccgagcgattatttgacgattcattttaataaggatgttagcgatgatcaagttcggacgttagtacttgatccgcacggcgctcactacgaagcattggtgcgtactagttttgcagactagtgtaattgacattcggcccgcgcaagcagcagatgcgcgggcttatttatgctttctaaaggcggtcgctaaagaaacaccgtatgttgcgttaccagcggagttagccactttaacaccattatttactgaatttttgatagcaagtattcttgaatcgcaacaagatgtattattgcttgcttttgatcaacagcaaattgtcggggcaattcgtgtgaatagtccgacagaacaggggctaacacatatcagtgaagttagtatcgctgttttaaaagcgaagtggcatcgcggaattggctctgatttgatggcgcaccttttagcgtcggttcgagaaataggaaatccgcgacggcttgagttaacagtacaagcccgtaatcaccgtgcaattgcactttacaaacggtttggttttgtgaccgaagcacaattagcagccggattttatgcgccagaaacgggctatattccggttgtgcaaatgtgccaattaatgaatatggatgaggagatttaagatgcaacaacaacgaggacgcggaatttacttagccgtattaggatcaatattttgggggattcaagggccagtatcacagtggctattcactgacacggcaattaagccagaatggctaatgggggttaagatggggctttcaggcctatttctattaggttatgcgctcattaaacaaccgaacgatgtttttacagtgtggcggcaaccgcgggactttacgcggatgttattatttgcagtattagggttatcggccgttcagtatttttattttctaacgattcaagccagcaatgcaccaacgactacgattttacaacagctaggcaccatcatgatcatcttaattagcttggtgatttatcgtagagcacctagccgcgttgaactaattgcagtgactgtcgcattgttggggacgtggttgttagtgacaaaaggacaactgacgcatttggcgatttcacacgcggcattcggacttagtttatgccttggcttttccggcgctttaaacacattaattccggttaagttattccaaaaatatccaacattagtgattgtgggctgggcgatgttaatcggtggggtggtcttcacatttgttcatccattttgggtcggtgttccaccgttgaatgtggcaacaatcagtagtgtcttattcattgctttgtttgggaccgcgctcgccaatctttgtttcttggggagtttacggtatatcacaccgacaacggctggtttattgaatacctttgaaccattagctgcgactatcggtactgttttattcttgaaaacgagtttcaacacctgggaagtcgtgggtgggattctcgtgatcagtacggtctttatcttgagttttggtcaatctaagtcaaaataagttaacacgatgaaccgaattgtggtataattaacagcggaaacaaagctcgtacattagtcaaaacaaattaatgattatgatgaagttgttaatcttgtcgaagccctaatgacaatttagctttaatccaccattcgctaaaagagcggttagcctgtctgcatagacaagttaaccgctctttttttgttagccgattaatttggtggccgcttttagcggttcaacgccaaaatcgttggcttctttaatcagaatcttggcacaagcgatactatcagccagtgcattgtggtgattgtcaagtggaatcgctaggttatcacacaaggtgtttaacttatgattctcaaattgtggatacaaccgccgactcgtcttgagagtatccaacgctaaataatggggttctggaatgtcgtagtgttggagtgtacttttcaacacaccaatatcaaaattcgcgttgtgggcgaccactaacttgtttggcgtgaaaaatggtgcgatgtgcggccagacttgattgaacttgggcgcttgagccacatcggcttcatgaatgccatgaatttgcgtattgcgactgctaaaataagtttcaggtttaattaacgtataaaaactatcaacgatttgatcgttgcgcacaacaacaagggcaagtgagcaagcactatgctgttgaccgttggcggtttcaaaatccattgcgacaaaattcattattttgaacctcgctttttataaagtttgcttattttaagcgaataaatcttgcgtgtcaagttcgacggggcagtggtcggaaccaaaaatttccgtgtgaatcttggcatcgactaatttaggttggagatcattggaagtaatgaaataatcaatgcgccagccggcattattgtcgcgggcgtggaatcgataactccaccaagaataaatatcgggttgatcaggatagaaataacggaaggtatcggtgaagccgcgatttaagagggttgtcatttgccctcgttcttcatctgaaaagccggcgttatgatgattggtcttatcatttttcagatcaattggttcatgggcaacgtttaaatcaccgcagaaaatgacgggtttttgagtcgataaatcagcgatataagtttgaaaggcattctcccaacgcatgcgatagtctaatcgtttcaacttatcctgtgaattgggtgtgtagcaagtgattaaataaaaagtagggtattcaagtgtaatcacgcgtccttcttgatcgtgttcaggttggccgataccataagttgcagtgagcggtttatgcttagtgaagatggcagtaccggaatagccttttttttcagcgtaattaaagtattgatgataacctggtaaatctaattcaacttggccggcttgcatcttagtttcttgtagacagaaaaaatcggcatctagttgattaaaagtggtcataaagtttttttttaaaacggcgcgtaagccattaacgttccaagaaataaatttcattgtcgatccctcatttctaaactccattttaacggtctagtcaataatacgcaaaaaaagtgttggctgttcaattcaagccgtctttgttaaactaggagtagattattttttgaggggaacgacaattgtgacaagtcaagttgaagtatttttacaagcaaaccaagcaatcgagattcatcaagcagaaccattgagcttatacacctttaccaaaacaggtggaccggcagatttactcgcactccccaaatctgttgcagaagtgcggcaattagtggccagtgccaatgaactgacattacccatcacaattatcggtaatgctagtaatctaattgttcgtgacggtggcattaaaggcttagtcatcatcttaacggcgatgaatcagattaaagttgaaggtaacttggtgaccgcgcaagctggagcagggattattcaaacctctgaagcagcttatagcggtagtttgaccggcttagaatttgctgccggcattcctggtagtgttggcggtgcggtctttatgaacgccggcgcatatggtggcgaaattagtgatgtactgacccgcgttgatgttttaatgcgcgataatcaagtacagacgttaacggccgctgacttagacttcagttaccggcatagtttaattcaagataacggcagtattgtgttggttgcctattttgaaatggcaacgggtgcggcaccaacaattcgcgcccggatggatgaggtcaacactttgcgggctgccaaacagccgctagaatatccctcatgtgggagtgtctttaaacgaccagtcggtcattttgtcggaccgttgattcaaaaagcgggcttgcaagggcatcaaattgggggcgcacaagtttctaaaaaacatgccgggttcatcgtgaatattgatcacgcaacggcaacggattatttgacgttgatcgaatacattcaaaaaacgatctgggcgaagtttaatgtgcgcttagaaccagaagtccggattattgggcaacataagcaaggttaaatcaatgatgaaaagctatggtaaaagatgattttatcagggcttttttatcaggatgagcgttttaaaaagaaagggtgttgggatggcaattattgaagctgttattttgttaattacgttggtgattattgccaatatcatcgggcattatttgccaaatttaccggttagtttaattgagatcgggttgggattaatggtggcgttagtctttgccgtcaagattccactaaaaacagattggttcatgttggtgtttgttgcaccattattgtttaacgatggccgtcgttttcctaagaaggaactatgggcgttgcgcggaccaattattgggaatgcgattttcctcgtctttgcaacgacgttaattggcggcttggccattcattggttagtcccggcgttaccgctggctgcaagttttgcgttagcggcaatcttgtcgccaacggatccggtggcggtacaatcgatttcagaacaggccgatttaccgccccgggttttgcacttagtgagtggtgaaagtttaattaacgatgccagtggcttgattagctttaaatatgggattgctgccgctgttaccggctatttctcatggcaacaagccgcgggcgattttctgtatattagtattgttggcgcactagcggggatgattatcatgttaatcattcattttattcgcctatttatgctacaacaaggctttgaagatgtgatgttccatacgattttacagttggtgacaccgtttatcatctatctaattgttgaagatctattccacgcatccggtgtgattgcggtggtggtagctgggatcatcagtcattcatcacggaatatcttcctcgattttttaccggagttgaagttagtgaccgaacaaacttggtcaatcagtgtttacttattaaacgggattgtctttttaattttagggattgaattacctgtcgctatgcataataccgtgcataatccgctgattaatacgagtgaagaaattctcctcgtcttagcggtttggttgattctggtgattgtgcggggactctggacactagcttacttgctctacaccaaccagacgaatcccaaaacattccgcgaaaacattaaaattgcggtgctctctggactttctggggttcgtggagcgattacgatggccggggtattatcggtgccaactgttttagcggatggttcaccgtttcctcaacgcggcttaatgctctttattgcggccggcgtgattattgtcagtctggtgatggccgttgtcttaattcctaagctgacaaaagtcaaagcaccaatcgagatgcgagggatgcaacgagatcttgaagccgaagcagccgcagaagatgaagcagctgctgatttattggatgaaacaaacgctaagatttacatgtacaaagtagcagcgagcatggtcgaatcccaacggcatattgataataaccgggctgctttagatttattggcagagtatcagttgatgatccgccggttggagagtcaacaaagcgaagcaagcacaagtgacgaactaccaccgttaattgctgaagagttgattttgcgacaagtggcatttgacggagaacgtcagaagttagagttgttatgggctgaaaaggccattagtgctaaaagctatcggcatggtaaacgtaagttacggcaaaaacaagtaatgttatcggttattgggacgagttttaattggcatcatgtgcaactacaagtctatcgtgcttggtcaatcagcaaacgctttttgacgcatctctggccgcggcatatcaaatcaccaagtgaaaccgagtggcaattgactgaacgtgaaatggctaaggcgggaattaaacaattgtcgtatttcctaaaacagcctgaaaatcgccaacgtcattataatcgtcaggttatttatcaaattattgtgcggtatcggaatcagattgaaaacatgaaaaatggggggcggagtaagaccgctatctatgaacgtcaattacaaaaattaagaatcaaagcgctcacgagtgaacgagtggcgattcaagagttattggaacaacataaaatttcatggcaacttgcagatgaattacgcaaaaacattaactattccgaaaatgcactgattttagcacgaacggatactgaatagattcaaaaaagccccacgcactcattttaaattgagtgcgtggggctttttttgatggttagaataagtggcggcggcggtagtatttgtagctgcaataaccaccaattgcaaagccggcgctgattagtgaaatcgtcaaaccccaatagaaataaggtggccagtatttaagggtaacggtatggtgaccttttttcagcgggatggcgatgaagttcttcaagccgcgtttgattttaaccggatggccgtcaaccgttgcatgccaaccagcagcataggggacggttgtcatgaggacttggttttgttgaggaatggtgatcgttcctttgatggttgtgtttgagaaagtattcagtttcaatgcatgtgcacgaagttgctgcgttaggtgcgtcaatgcttgataattcaaactatataaattaatattttggagccaaatttcctttttagagaagctaaggtcaacggtttgttgttggccgattgcgttacttgtcaggtttaagacgacagtatcgcggaaagtatcgtattgttgtagcgtgtgaccgtttaatgagacctgaaccgcatttttttcgaggtttgagcctaatgtgaggtaataggggtcactcgttgtgggtgtgaaggtatagatgacgtgagctggattcttcggatcaacccggaggaaagtttcgttgagttttggtttttgtttagcattcttgtaagtgacagtattgaaaaattgaagtgtgaagagtggctgttctgtcgctgaattgactaagtctgccgcaatctggttctgttcaaggatgggataattggcaaccacatgatgtttaagcactttttcagaggccgcaaagcctaaatcaagtgcgttggggttttgataaattgcaatttgatctttttttttgagtaagttataacgtgctaagtccggcttattcgtactgagtggaattgttgcttgcccactagtattgttaaggtagtagcgataacctaataacgcatcggtgaacagggtctgattagtatcggcaacggcgccatcgccagctggttcgccaatgctgcccatgaatttcggatagctcagttcgagcatcgaattaaaatgagatccgccgaaataatcagcttgcatcgggtcattttttgtccgcataaaggttttgccaattcgttgaaacgcggttttatttggaattgcgctaatggctgattgtaaatgagctgtataatctgcgtaatctttttgtgagacatagctaatttgattaagactcattgtcgcgttggtgaccatctcaccaccgacgcatagaactaagagcaaaggataatagcgcttgagcggctttttcaggagtaaaagcaagcatgtcatcagtaagaaagcgatgcttaagttaatctgattaggacttagcgcggtgaagctcttgagatgtttggcagtataaccaaaagccgccatcaacattaaaaacggcaacaagagttgataccaactaaatcgaaggtgctggtggagccgttgaaccgcgagcacgattagccaaaagctaaccacatatgaaaagcggtaaggataccaaaccggaaattgcatgccgtgccataataaatcaaggggttcataacacattgaaacacctaagaaaatggtgactaataaggcaactaaccgttcttgccaggcaatcttgcgtgttccaaaatacaagatggcacaaatcaatacgagactgccgacgaatatattcggttcgccttttggcatttggtcgaagttaaaattgccaatcacaagtttagaaagcatcttaagcggattatattcgaacttccaatgaatcttttgaatggtgtactgccctttgctctgcgtcaattggaaaaaagttggcaataggagccaggctgagagtaaaccggccaagagtgagccactgatgaagcgggcagcgcgttgccatagatggcgccaagtttgccaataatgagcacaagcccacgcaaaataagcaatgacaaacaggcaaaccatatagcccatataatagttactcattaagagtgcggcaagactcaatggataaagccaaaagtgacggcctgtaaagagccggtcgatgcctaagacaactagtggaagccagacgagtgcatccaaccacataacgttaaactggttggcaattgcaaacccggataaggcgtagacaacactaagtgtcggtaaccaccagctatggagtagtttgttagattttaagtagtacgcaaagctaagaccactggcgcctgttttgaaaaggacaagcagccaaacaccaaaactcaaccaagttcctggtgtcaataggacgattagattgaatggactcatcaaatagtaagcccagaccccaagcatgtcgccccctaagcccttagcaaaggaataaaaaaaagtttcgggatggtgcaatagcgtacttctgaaaaaagcgtaaaaatcgatgtattgttggcctagatcaacagtcaggattgtttgccctccaaaagggaacacttgtcgaagtagtccgtagataaataaaatgccaaatggtagtaagaaactaaggcctaatgtataatgacgacgtgcaaaagcgtaaaatcgactcacggtaatcctccaattaataaaaaaatctaaaaattaggttgctagtccgtttttaactgagaaaagctgtaaaatataaccagttaatgactatgcttaagcataccataatctcgtttgaatttagagatttggcatagcttgtttaagataattttgctaaacttaaacaatacagcacaaaatcgctcaaaaggtcgcttggcgactttttgaagcatagagcggcgccatcttttactagagcggcgctaaataaggagtatctgaccgtctgtgaaaatcattaagagaaaaaacaaacaaaatcgtgaaaaatcactgattccattccgcttaaatttcctattattcgttgtcttcgcgttatttgccgcgttgattatgcaattgggacgcctgcaagtgatggagggcgctaattttcaagcgatggtcaacagtactgataagaaaatcgttacaggtaacgtgcctcgagggatgattctggattcaaagggccgtgtcttagttgggaatactgctaaaccggcgattacttatacgaagaatatgaatgtcttggcagacaaaatgtatgcagaggccaataagttaacccaatatttaacggtcccgacggataagttaactgaacgtgatcagattgactactacctcagtaaccccaagaatcttaaaaaatggaacgcaaaactgcctaaatctgcgaaggttgccagtgatggttctgagttgccagaaaagaaggtttatcaatcaacaatcgaattggttaaaaagtcgtttaaagggttaaacgagcaacaaaaacaagccgctgcgattttcaaaattatgagtggggcttatcaattatcgacagtttatattaaaaatacggatgtgactgataaggaaattgctgaaatcagtgaacatctaacgagtttgccagggattaatgtcagcaccgattgggaacgggcttatcctaatggcgattcaatgcgcagtattattgggcatgtttcaactgaagagcaagggttaccagaagatggcgtcaactccttgctagcacagggctattcgcgtaatgatcgcgttgggaccagttatttagaaaagcaatacgaaagtgtcttgcatggttctaagtcgcaatcacaagttgaagttggtgcgaataatcagattctctcaagtaatgtcttatttaaagggcaaaaagggagtaatttaaatttaacaattgaccaagcttatcaaacgcaagtggaagcggctttgaagaaagtctatgatcaggcaaaagcagcgggagccactcagtattctgatggtgcctatgccgtggcgatgaatccgaaaacaggtgctattttagcaatggctggcgaatccaacgatcgtaagtcaggtgaaattgccgatgatgcgctcggggtgattaatcacaccttcgtcatggggtctgctattaaaggggcgaccgttatggggggcttaatggatggtgtgattacgccaaccaataataccttaccggatacaccaatctatttaagaggaacgccggttaagaaatctgtttacccagttgggacgtttggatcattgaacgctgaatcagcgttggaagtttcttctaatatttacatgatgcaattagcgatgttagaagggcatgccaaatatgtacccaattcttcgttaacgatggattcagatatctttacgaagatgcgtggctacttcagtcaatttggcttaggacaaaagactgggattgatttgccaggtgaagccaccgggatcgaagggccaaccgtcaatgaatatggcgagccagccaatggttcattacttgatttatcttatggtaactacgatgcctacaccttaattcaattggcacaatacatttcaaccatcgcaaacggtggtcaacgaatgaaaccataccttgtggattcgattcaacaaactggtaacgatgggtcagctggccaagttggtaccaagaccacgccgacagtgcttagcacagttgatgcgcccgaaagttactttaatgtcgttaaaaaagggatgtacaacgttgtcaatgggaccaacgcttgggggacagcacacaccttgaaagatattaaaccaacgcttggcgctaaaaccgggacggcacaatcatttgcccgtgaagatccaaacgattcgacaagtaagcaagtcgaaaccgttacttctagtttggttggctttgctccatacgataatccgcaagtggcaatcgccattgtgttcccgaacttaaactctgataaagggcactacaatacgttactagcccgtgaaatgattacgagtttctataaattaaataacattactgaatgaaatattccaaaataaccttttcagataccataaaaaatggtatgatactaagagtctaagaattaaacagttttttagaaatttacttacagcttggaggctatatcaatgcgtgttcacattacaatggaatgtacagaatgtcacgaacgtagttacttatcaaacaaaaataaacgtaacaatccagatcgcttggaattaaagaaatattgcccacgcgaacgcaaagtaactttacaccgcgaaactaaataatagtgacgcacatcaaaagtcggggcgcttcgcgctcgggcttttttttattaaggaggcttttgaatgcggactaaaaagcaaattcggcaacaacaaattgcggcattacaaacgcttgcgcagacgcctgcgcttaaacatgcccaagaagcacaacttttggaattgttaatgacaaccgaggtgtttcaaaaggcaataatcatcggtgtcacgttgagtcagccaattgaaatggcgacccagccggtaattgatgccattcgtttggccggtaaagaagttgtagtgcccaagacattgccagagcgacaaatggctttttacccgttaacggcaaccactgaattaacaacgagttcctatggtgctttagaaccagtggttacagctggtagccaggtgttaatccctgatttaatgattgtgccgggactagcatttagtccagaaggttggcgggttggttttggtggcggttattatgatcgttatcttgccaaatatccaatgccaactgttgcactagcgcttaaaccacaacaacgaagtgctgattgggccattgatgaattcgatatccaactcgatcaggttcttcaggtctaaaggagaaaagatgactaattttaaagaacgttggcaagacgcaccgattgtggtgtatgccttgatgttactaacgattttgatgtttgcaatgatgtttttgaatccggttgtatggttgaacggctttacatcggttaacatgctaatgaatggccggattattgggtttatgatggcatctgtcaatcatggccggtttatgaatctcttcgtagatttggttattttgttttttgttggtggacaacttgaacgattattaggacactggcgcctattagctatctatatactgagcagtttggcgagtttgtttacaacgggcgctttttttggtctcgatacaccaaccgtgactgctggaacagctatcttagggctattcggtggcttcttgatgttaggtgatgcctttaaagaagaatccgtgctaggacaagtggcacgccagtattggctgtttttatttttaacaatcggattacaatttattgtcgatcacaatgcattgtacgcaatggtaggtggggtacttggcggctttttaagtagtatggcgctgggtgcacctaaagtgggtaagattgacccgctgaaccgtgtggtgagtgggttaatttatgttgcaacgatgattttatttggttttctgggtatgaatcattaatcaatttatgtataatgttaaaggtgaagttgatgagaactctatatgatgtacaacaacttttaaaacaatttggcgtttacgtccatcttggtaaacgactttgggatatcgagctcaccagtatcgaattacggcacgtttatgatgcggggttaatcgatggcaaagtgtatcgtgatgctaagatggttttagtgcgtgaacatcggttggagaaaaatgaagcgtttaatcacaatttattggaggagaagtttaaatgacagacaagaagttaatcggcgttgatttaggcgggacaactgctaaatttgcaattatgacaatggatggcgaaatccaacaacgctggagtatcgatacggatattttagatgaaggtagccacattacaccggatatcattgaatcgattaatcatcatttagatttatataacatgacacctgctgatttcatcgggattggtatgggcacacctggtagtgttaacagtaaagaagggaccgttattggtgcttacaacttaaactggaagacaacccaatacttacgtcgcgatatcgaagctggcacacacatgaagcttgcaattgataatgatgccaacgttgctgctttaggtgaacgttggaagggtgctggtgaaaaccaacccgatgttgcttttgtcacacttggcactggagttggcggcgggatcgttgctgatggccatttattacacggtgttgctggttctgcaggtgaattaggccacgtaacagttgaaccacatggttatgaatgtacgtgtggcaaacaaggttgtttagaaacttatgcttcagcaaccggtgttgtgcgcgttgcacgtgacatggctgaagaatacgctggtaattcaaaattaaagacaatgttggatgatggtgaagaaatcagctctaaattagtttttgacatggctaaagaatcagatgcattggctgttaaggttgttgatcgtgtttcttactaccttggtttagcattagctaacgttgggaacatgttgaatcccgcttacatcgttatcggtggtggtgtttcagctgctggggaatttttacgtaaacaagttgaagcttactttgaagaatttacattcccaaatgttaaaaatacgactaagattcgtttagcaaacttaggaaacgtagccggtgttatcggggctgcttcacttgcacttcaatttgatcaacaataatttgttataagggagtcttatcgatgcttgtattagggacaattaatgtatgggtagtaattaatattattctgatcgccattttactttggttcttgggcgattgggcatattatcaaattcaacgcaaacgcttaggcggcgaattaacggaagcggcgtttgaagaaacaatgcgcaaggcccaaattgtcgacttacgggataaaaaagattttgatgcaggccacattttaggcgcccgcaacttaccttatccaatgttgaaacaaaatatgggtgaactacggatggacttaccagtctacttatatgatgcaggcattacgctcagtatccgagcagcactgaagttaagaaaagctggtttcaccgacattaaatggttgaaaaagggttatgctggttggaccggcaaaacaaagcgtaaaaagaaattaaattaaaccaaaaaagcccaagagttactagcgaaaaaaactagtcaactgttgggctttttatagagtgcgcaggcagatggtcatactctgaggattagtggcataccgtaaatgagcggcagagccgatcgtttacggtatgtaactaaccgaaagagtatatctggcggcgcacgtttcaaaacagagtgcgtttaaagcggtttgactctgagcattagcatagtgttgttaatgaccgacaaagttggtcgtttgcaatacgaagctaatcccaagagtcagctttaaaaagcacgtttccacaaaaaaagtccgtcgccaatcaggcaacggacgcagtcttttcaaagcgcttagccttggtgagctgaatggctcttacggttagcacgtcgacgactttcttcaatttgattttctttttcttcgattggatcaacgacggtcttcttaaatgccaagagtgaaccggcaatcgcgccgactgttgaaacggttccgattacgaaaccttttagaaatttatgtttcataggtaaagcctcctcaagtctcaattcattcaagtacaactttattatcgcgtatttaagcgcgaatagctagtaaaatacgttaattaatgtggtgaaaatatggaaaaagaaaagctaatcgtcattgttggtccgacaggcgttggtaaaacagcgttaagtctacaactcgcacaacagttgcaaggtgagattatttccggggatgcgatgcaggtttatcgccagttagatatcggtacggccaaagtcacaccaaaagagcaggcgcttgcgccgcaccacttaattgatgtggcggatatcgatcaacgcttcactgcctttgactttcaacagcaaggacaacaactcgtcactgaaatcgtcggccggcaacacatgcccttggttgttggtggaacgggactttatttgcaggcgttactgtacgatatgaccctgggtagtgcgcaagatgcggaacagaattttacgattcgtcaaaaatggcaaacttttttggatcagcattctgaagaagctttgtggcagatgcttaatcaaattgatccgcaagcagccgctaaaattccgagtgcgaatccacggcgtgtggttcgcgcattagaggtttatgaaacaacgggaactttgttttcacaacaaaagccaaaagaattacgttatgatacgtttattattggattgaattgtgaccgtgcattattatacgagcgaatcaaccagcgggtggatcaaatgatcgatgctggacttttagaagaagcgcggttggcttatgcacatcgtgaaacgagtccgcaagccgtgcgggggattgggtataaagagttcttcccatactttgatagtgactgttcattagacgtggcaattgctcaagtaaaacaaaattcacggcactacgcaaaacgacaactaacgtggtttagaaaccagattccggtcaattggtataatctggttgaacaacctgaagccgatttggctcggattcaaaccgatttacaacaatggttacagcaataatagaaatggagtggttaaaaaatggattggcaagcaaacttagcaccagaattacaagctaaaatcgcagcagttgatacgcaaatcgcaccgcgtttacaagcactggatgaacaaatcatcaataatcaagcaaaggtgctcgaagcgtttcaagcagaaaatatttctgaatcgcatttaaacgggacaaccggttacggcaacgatgatcaaggacgcgataagttagaggccgtctatagtcacgttttcaaaactgaagatgcgcttgtgcggccgcaattggtttccggcacacacgcgattggaacggccttattggggatgttgcggcctggcgatgatcttttatatcttacgggcgaaccatatgatacgttgcaagaagtcatcgggatggccggtaacgggattggttcactaaaagaattccaaattggattcgattttgtgccattattagctgatggtgccgtggattttgaaacggcccggaccaaaattacagctaagacaaaagtggtcgctatccaacgttcacgtggctatgctgatcgcgatagtttcacggttgataaaatcaaggaaatgattgcctttgtcaaaaacattaaccctgaattgattgtctttgtcgataatgcttacggtgaattctctgaaacaacggaaccaacagaattcggggccgacgtaatggccggttctttaatcaaaaatgctggtggtgggattgcgcaaacgggtggttacatcgtcgggactgaaaaattaatcgaaatgattggttatcgcctgactgtgccaggtgttggtgccagtgaaggcgccacacaaggcaatctgcaattgatgtttgaaggtttcttcttagcaccaagtgtgactggtaatgcgattaaaggggctgtttttgaagcagcgcttttggaacaaatgggcttgagtgtctcacctaaatgggatgcccctagaacagacttgattcaaacggtgaacttcggtaatccggatgatatggttaagttcgctggttgtgttcaagcgcaatcaccaatcgattcatttgtgacccccattccaagtgattttgccggttacgaagatcaaatcgtaatggctgccgggacctttatccaaggtgccagcatcgaattttcagcagacggcccattgcgcgccccatatacactttacttacaaggtgggttaacttacgcgcacgttaaactcgcgattagtcgggcagtccaaacaaccttctttgaaaaataaatgccaagcggtcaatcaaattcgcgtttgattgaccgctttttttgtgcgttaagcatggtatgataagggtgcaacgaatcgtagcggtcggttttaagagatgctttggattgttgctagtataaatgtgtcattctcgctacggtaagtcttggaggtggttagatgttaattggtcaacaattaaaacaatttcgtttggatgcgggctactctcaacagacactcgcagagcagattaatgtgtcacgacaagtcatttctaaatgggagacggataaaagtgcaccagacttgaatacattggttgttcttgccaaattgtataatgtaagtttgaatactttgctcggggttgaaacggtcactaaaccgaattcattctttgggcggttgcggcaacattggcatttggcagaaagcgaaaatacaaaaccgctgtccgatttaggacggattatgcaacaacccgaacaacactatgtggatttagcacaacagttcagtgtcactttgacggatgtaactgttactagtgatggccaaacaatgccagcgaattggcggcaagcacggagtccttatttaattgtattagaaccgcgccaaatttttttaaagcagacagatgttttaaaagtcatgcccgcaaaagttgttaagcaacttgcgacaacggaaattcgaacaattcattatgcggtcatgcagactgctggaccatcaaccattggcgggttacaaggtatcgggcacgcttatcgggccatcgtgacggttgatacaaagcaatccgtagcaccatactatattaccaaccaggattttcttcagttggcaaaagttctgaaagcttatgcacaacaggaacacgttcaatttgatgatcagatggctttgctgccttattttatgacgcatgacacaactgactgctttaattatttagaggtacattacagcgaattagcggaaaaagttggggttccagcagaaagcgcaggacaggcggtttatcgatggtagatgaaacagcaaaaaacaactttgaaacggcgacagatggggttcaggcttatcacaattattttggcacgccaacgcacgatgatcgtatttggtttgaactcttaacagttggggtcttccaagtggggttgagctggaaagtagctgcaagtaaaataccagttctgcgacaacaaatggtggggatggtgattgatcaagtcgcacaatttgatgaaatggatgttgaacgcctgcaaaaagaaccagatatgattcgtaatacgcgtaagattcgggcaacgattcaaaatgcgcgggcaattcaagccatccaaactgaatatggcagtttttcagcgtatttgtgggcgtttgttgatggtcagccgcaattgcttgattcacaaatggctggcgtgtccgataaatcagcgccgatcagtacgcaacttgcgaaagagttaaagaagcgccagtttaaatttgttggaccggtggtaacgcatttgtttatgcttgcaggtggtttgattcaaatcatcgatgaagactaatgcctaaaaggtaaaccaaattggtttacctttttttgttggctgatgttagaaaatctgacatcaaatgttgaccgtttgaaaggcgactggtaagataaaacgcaagtgaggtgaaatggatggctgaaaaacacttaaggcgcaacttagcagttttaccaattggtacggtaatgaaattgacgggacaaactgcgcgtcaaattcgttattatgaagcacaggcgcttgtttttcctgaacggacaacgggccatcaacggttgttttcgttgaacgatgttgatcgtttgttggaaatcaaggattacctagctgaaggcaccacgatggcacagattcgccagatttatcagaagaaggcggatcggcagcgtgataaacaattatcagacgaaaaagcgcggcggttattggccaacgaattattatcggtcggcggcttagttggacaacagtcaaccatttcacaatcatctaaattatattaaggggcgacggattaatggcacgtaaagtattgacagcagaagcaatcaagcaattagtggatcaagaaaacgttaagttcttacgtttaatgtttacggatatcaacgggattatcaagaatgtggaagtaccaattagtcaattagataaagttttaagtaacaaaatgatgtttgacggttcttcaatcgacggttttgtccggattgaagaaagtgatatgtatttgcggcctgatttaagtacatggctcattttcccatgggaagcggaacatggaaaagtcgcgcggttaatctgttctgtctataccgcagatggagaaccattcttaggcgatccacggaataatttgaagaaattagtgcgcgaaatgcaagataaagggttcaaagactttaacattggaccggaaccagaatttttcctctttaaattagatgaatacggcaaaccaacgttgaaactcaacgaccaaggcggctactttgattttgcccccgttgatttaggcgaaaactgtcggcgtgatattgttttggaacttgaaaagatgggctttgaagttgaagccagtcatcacgaagtcgcacccggacaacacgaaatcgattttaaatacgctgatgcagtcgatgcagcggataacatccaaacctttaaattagtcgttaaaacaatcgctcggaaacatggattacatgcaaccttcatgccaaaaccattacacggtgtcaacggctctgggatgcacattaatatgtcactctttaatcaagatggtacgaatgccttctacgatgaaaaaggtacagaacaactttcaaaaacggcttatcatttcttagctggcttattgcaacacgcacgcgccatcacggcaatcaacaacccaacagttaactcttacaaacgattagtccctggttttgaggcaccggtttatgttgcatggtctggtcataaccggtcaccattgattcgggtcccacaatcacgcgggttatcaacgcgtctcgaactacggagtgttgatccaagtgccaatccttatttagcaatcgggtcgattttggcagccggtttatctggcttagatcaagggctcttgcctgatgctggtgtggatcgcaacatctatagcatggacgaaacagaacggaaggaaaatcacatcactgacctaccatccacattgcacaatgcattgaaggaactagccaaggatgagattatcaaagattcaatggggccttatctctaccagagcttcatggattctaaatcattggaatgggcagcttatcgtcaacaagtttccgaatgggaacgcgaacaatatttggaactctattagtcgcaatttacgccatgtttttgtacaattaaactttagaaatagaaagttggtagagtatgaaaacattggtgattatcagccatcccgagattgagacgtcgatggtccaaaactttttaaaagcgagtgcagcaccactggaagccatcacttggcaccacttagatgcgcttgagacgttagatgtggctgctgaacaagcattattacgcaaccatgagcggattatttttcaatttccgctctattggtatgctgctccagcgagcttaaaaatgtggttggacaccgttttaacggggcaatttgcctttaatggccgccaaccattagccgggaaaacactaggggttgtcgtttcaactggtacggcggctaaacattttcaagctggcggcagtgaacaagcaacgctgtctgaaattttgcgcccatatgaattggtggctcgtaagctagggatgacctatttaccaccacttgcgattcatcaattgggttattggcaagaaactgataaacaatgcttggtcatcgattatcaacggtatttgacgcaatccgagttcaattttgatcagcaattagcgtggtttgaagcgatgctgactaaaaaggctgctgaagccacatcgcctgaagcgcaacaacgtttaatgcttttaagcgaacaattcgccgacaaacgatcggaattaaccgatttgaattggcaagtccaactgattcgcgaagaagagggggaaggctaatggattggttaacagaacaaattcaactacaaaaagaacaagccacaacgtatgaagagcaagctttttatacggcgcttcaacaaacgagtgatgaactagcattacggattgaacaacgccaaggtgaacttgatggtcgaatctggaatgcaacgaattggtaaactaatacaaaataaaaaacgccgcgacgaaagtcggggcgttttttgtgtaattcgattaatagcgtttgattaatgtatcgaaagcatcaacgattgcttggaagaaaccaagtgtatctgggtttgtgatttcttgattgtcatctaataagttcatgacattgccgatataagcttctggttgttgaaccgttggcatgttcaagaaaacaagtgattgacgtaagtggtggttagcaccgaaaccactgattgcaccaggtgaaacgctgacgatttcagctggtttgttatcccagatgcttgcaccataaggacgtgaaccaacgtctaaagcatttttcaatacggctggtactgaacggttgtattctggtgtgacgaataaaacggcgtccattgtcttcattttatttctgaaagttgtgtaagcttctggtacttgatctaaatcatcataatcttggttgtacaatggtaagtcaccaatttcaacaatttctagattataatctgatgggaataatggcatcaatgatttagcaactgatttgctaaatgaatctttccgtaaactaccaattaaaactgcgatattttttgtcatagtgaaacctccaattgttttacttattattagtaagtaactttagtatagcacgttcccctgaaaaggcaaccacttttacttactaatttaagcatagcgaattggtgaagcttttagcaaacaatatggtcggccattgattggcattggcaagctataaatcgtataatagcagtaagtagaacaaagatgggaaatgaataatggaaattaaatggcacgtcaatcaaccacaatctgttaaacaattcttgctagcaagtggcatcagtcaacgattgtacgccaaaattaaggcgttaggccaaccgattctagtaaacggacaaaaaagtgcgcctagtgatcaggtacaatgcggcgatgtggtcacattgcagttaccagctgaaccggccgatgaatcagttgctgttagtcacgaaccaatcactatttgttatgagaacgagtattggttggcggtcaataaaccagctggcttggcaacgattccgggtcccactaatcaaacggatactttgttgaatcgcattaagggttactggcaagcgcagggtgcaacagatttagtaccgcatatcattacgcgcttggattttgatacaagtggaattgttttagtcggcaaacaccaaattgcacaaagtctattgcaaccgcagattgaacagcatcaattacaaaaattctatttagcagttgtttcaggaacgggtttaccagcatcaggggatattcgtgaaccgattggacaaatcgaccatcaaccgcggcgtgcggtgttggcggatggtcagtcagcttggacgagttattggcacttgggtgcatcgggtcagttgacggcggttaaagttcagattcatactgggcggacgcatcagattcgggttcacttcagcgcgttaggctatccattggtgggtgatcagctctatgatgggccgcttgatttagggataatgcgacaagcattgcacgcgtatcgactgcaatttcaagatccattcagtcaacaatcaatctcgattacagcaccgattgcagccgatatccaagcgattctacctacagaacgattaccaattgattgattcaaaggaagatgacaaatgaaaaaatggcaatggttactaatttgtatcttgtgtttcggcattggtggggttatcggtcatgtagcgactggtccaacaacggtgccatcgattattcagccaacttcggccaccgcaaaccagcccgttattttcgtaccggggagtaatggaacagttgaagggtttaatggcacctttgctaaattgaaccgtcaagccacacgccatgttttaaaagtaacggtattaaaaaatggtcacttgaaaaccagtggtcgctttgatcaaaaaacacaacaccccgtgattgtggttgcgtttgaaaacaatgcagatggtgatgagaacgtctttaaacaatccgaatggtttaaattggcagcaggtaaattagctaaacaataccactttacgcattttggtggggttggttattccaacggtgggcttgtattaacgcggtatgctgagcgtagtggaagtggaccgaagattacgcgattactgacgttgggaacgccatataatggcatgtcggagcacatcactcaggaaacaccgatgttagctgatttaaagagccgccggcaacatttatccaaagacttagtggtctattcagtcggcggcacaattaacgataagaatgatgggattgtcccagcagcgagtgttgcggctggtcggctcatttttcaaaagcaagttgctgattatatgacaatttcggtgagccagcaccatgcagcccatactgaattgccggataatccaaccgtcatttcactgattcaacaattgatgtttaaataaaaaaaggtgtgtcgcagcaagttgagctgtgacacacctttttaatactattgatcgattgttttcaagagattccgcgtgatgagcattcccatgatgaagattaaaatttctgttaatgggacactcacccaaacaccggttaatccgaagaggctagaaagaaccaagacgctcgcaatcaaaacgatgtagccccgcatgatggccacgaaaaatgacaatcgaggttgcgcaatggcggtcatgaataagttattgacgatgttcatgcttgagaagaaaaaactaatgaaaatcaagggaatgccagcagacgcgtagcgaatcagttgttggttgtgttcatggttaaaaatttcgatgatcggtaatttaagaccaatcaaaacgagatataatcctaccgcaatcccgagtgcggaaagcaaaccgattttgagactcgttttgacattatcccaatgatgtttcccaaattcgcgactaacgattggctgaaccccgactgcaacaccgttgaatagggatagaccaactagtaagatgttggcgataatgccgtaagcggcgacggcatagttattactgagatggagaataacgatgttaaagacgaaaatgctgaccccagtactcatttcagttaagaaagatggaaacccgagttgaattgctttgaacgtcggttcaaaacgtaaggttaagtgctgcaaagttagtaaccgttgtgggtgatgccggtgttgtgtcaaaatcagtaggctaacgattggcgaacaaatcgtggccatcgcagcacccatcatgcccatgtgtagggggaacattaagaggtaatcgaagataatgacgaataagctttgtgaaagtgtcgcaatcattgtcaaatgtggattactatcgttacgtacgaaacttaagactaagttattgatgataaataagggactgccaattaaaataattcgtaaataggtcaagcttggggcgagcgtttcatgattggcacccagtaagtggagtagtgggtgaataaaaattaagccgagcgccatgatgatgaggcctaataaaatcccaaaagaaagaacttgagtgaaaatcgagcgactcttttcgggatgcttgctcttgttaattgagaaaatcgtggcgcccccaatcccgagcatcagacctaaaccgttaaataagttaaaaatgggcagatcaatattcaaagcggccaagccaattggtccgactgcgtaagcgataaaatatgtgtccgctaaaatatagatggataagcctaacgagctgaaaacgtcacggatgatgtagcccgttaattcttttttgatatgtggtgagttttccaaaataacactcctattcgattggtagtggggtcgccattaataacgcaataaatgattggattggtgctggtaaattcttccgggcgacaaggtagaattggcgttgatattgttgggacaatggtcgatagggaatttctgggtaatcaagtaaggctgcgctagaaactaatgattggccgataccctgtcttaatagttggataatcatcgcattgcttttgatggtcatcacgttttcgagtggtaaattattttcttttacgtaattcatcgtgtagtgatagacgccagaaccctgttcacgaagtaaccaaggttcattcgggcgacctgctaggaccagttgatcggtctgtagtggcgtccgaatcaagtctttttcggttaatggtttttcaatgaaaccaaagtctagtttgtgctgcgtcaattcttgaacaatctgcgatgagttgagtgtactgatatctaaggcgagtgtttcaagggctggccgatgcgctttaagcagggttggcaataagtaggttgcagtggtgtgcgaggcgccaattcggcacggtgtttttggctggccatcttgatgatggagtgcgtgcaaatcttggtcccataaatcaagaagttgttgtgcttgttggtagaagagatcagcactcttagtcggcgtcatctgctggcgcccattgcgttcaaatagtgtgacccccagcgcatcttccaattgtttaatttgcacagaaacggtcggctgcgatagaaaaagcagttgcgcagccgttgtaaaattcttggtttcataaacggttttaaaagttgttaaaattttaaacatatcatcacttctattcgttatcttaataaaaactattataaagatttattttattaattgaaagagtttcggtatagtttaagataacaagtgagaaggagtaaagcaatggacaatataacaaaaaaaatacctggctttgcgttatcgttagcgattgcgattgccagttattacatcgctaaattatggttaccaatgttaggcggcgcaacgattgcgctttttgtcggcatcgtacttggcaatacttggttgcaacaaccggtattagcagccggaactaagttttccgagaaaaaattattggaatattcagtcatgttactgggtgcgacaattacattccaaagtattcaacaaatcggctggcatggtgtgctgtttaccgtgttacaaatgagttgtacgattggatttgccatctggtttggccgccggttgcaatttagcgaaggtacctatttattgatggccggtgggaatgccgtttgtggctcgagtgcgattggggcaattgcgcccgtcatcgatgccgataacgaagataccggcattgcgattacattggtaaatctaatggggaccatcttgatgttactcttgccagttattggaacgttgatgtggggacataataatgaactccgtggcgtgttaattggtggaacagtgcagtcagttggtcaagtggttgccagtgcgacgatgattaaccaaggaacggttgtcacagcgaccttattcaaaattttacggatcatctgtttggtttttgttgtcagcggttttggttacttacatcaaaagaaacaaagtaaagtcagtgatacaaaactgagcgaacaattattagcgaagaagagtagcttagtgccatggtacgtgattggcttcctattattctgtgtcttaaatagcttacgggtttttccaagccaatttggtacactgtgccatttcttgagtacatggtgtgaaacaacggcgttagcagccattgggttacgcttgaacttaaaggcactcttcagccaaggtaaacgtttattagcatatgccggcggattagtgaccgtacaggtagtcctcgcgattttattaattacactattattctagggcgtgtcagcagctaggatgtttctaggaatattgaattattaaaaaatctgccatcaacaattttgttgatggcagatttttttgttattaagcttggtaagtgccgacttgaacggcttgttttaaagtggctggtgtgtgatgtgacttggcgaaaaattcgcttaaatcacgtccggctgttaaacctttaaaatgtttgccgccttgccaaggggcgattgcggaaaggtcataaacgacgccatcaacggcaacgtatgcgggttgaccatcttgaccgttatattgagcgagtgtttcttttgtaaagactttatctgtcatgattaaaaatctccttcgaattgtgaatgggttaccaataatatagcgctagatgcagaagttggcaacgattaagttgtgcactttgaaaatgaataatgttgaggctagcgaattagagaattattcgtgaccttaaatactgttcttcaaataataatttgttaaaataatcataattgggggggatgaaaatggacaataaaaaagactggttgatgcgacaagttgattcttttgcggaaggaatgggttatttgttatcgaaacaaagtggtaattcacagtcggaggttgtctttccacaagaaaatgctaaaaaattgccttttcaaagggaattggcaagtttaattgctgccaacgatactagaggggccgcccaacgattattaaaattacaatacgcaatgcctgaagaacaatttctacagttaggtacatggttattattagaaatgaagcaggacagttttcctaatcctttaacccgtgaagcgctgacagacgttttaaatacgattaattaaataattgaacgaaaaaaccaccctaataaataatagggtggttttatttaatattgatggacccgaccagattcgaactggcgacctcctacatgcgaagcaggcgctctcccaactgagctacgggcccaaacgcttacaaaaatattttagcacttttagctaaaatagcaaggcgaattagtgacgggcagatgttctgaggttatttgcttttttgccacctttaatcgtgcgggttttgaagtgggcttgttggctatcaggaacgaacttgaagtgttgcattttcccggcatatggttggccactgaggcgaatcttcaaccaatcttgcatggcttcaatcattccagtcagtttttcggcttgttcagaatttgcttgtttttggacttcggttgtaacatcgttagtgagataagccaataatttttgatgataggcaattagttcttctgtgagtggcgcttggttatattgattgaaaagtttttgaacaaaacgcattgcatctttagcgttttgtggttggtaaaagcgatcttgatcagacatagaatttccctctttcttcagagtagtataacgaataatagtgctcgtcacaaccgtgtgctttggtataatagagaaatactagtttttcggaggtcagcaatgtttaaacgtaaaagtgattggttcttagtggctgcactggtgatgatggcgatcttattttacagttcttcaatgacgtatcatgaacaaacatcggtgcccactttggaacgatttctcaagaatgaaccacttaaggcttggttaagtcaattttcgttccattatgcaggcagtgaacagagtgtaaaagcatctgggtatttcaaatttgtggagtttttcgtgcgaaaaggcgcccattttgggacgtatttcttattggcggcttttagttatttagggctacggccacgcgtaaccggtggttttttagcagttatctttagttggctggcagcaaccgggtatgcggccacggacgaatttcaccaaatgttgactggtgatcggacgccactttttcaagatgtgatgttggacagtgttggcgcattaacggggattgtgattgtttgcgcactacagtggatttttacacaaaaaaagagacgatagcccgactatcattgcttttagcatggtaatttgctatcatagaaaacgacttagtaccagaattctataatcgaaaagaggagttagatatgtcaggacattcaaaatggcataatattcagggtcgtaaaaacgcacaagatgcaaaacgcggcaagattttccaaaaactatcccgtgagcttttcatggctgcgagaagtggcggtcctgacccaagttctaacgccgcattacgtttaattatggataaagcacgttcagctaacatgcctaaagataatatcaaacgggcaattgataaagctgacggtagcgatggcgcgaactacgatgaaattacttatgaaggctatgcaccaggtggtgttgccgttttagtacacgctttaactgacaataagaaccggacaagttcagacgttcgtgttgcatttactcgtaatggcgggacaatgggtgcttctggctcagttgcttacatgtttgatcgtcgtggttacattgcgattgcacgtgaaggcttagatgttgatgaagatcaaatgtttgaagacattctagaagctggcgcggatgatttacaaactgaagaagacgtgtttgaaatttacacagatcctaaggaattagcaaatgtccgtgatattcttgaaaagaaatacacattggcaaatgctgaattaacaatgattccacaaaatacaacaccggttgatcctgaaaaagcagaacaattccaacgtttaattgatgctttggaagacaacgatgatgttcaagaagtttatacagctggcgaactaccagaagaagactaatttgtttgataagtgcgttgcaagtaattgcaacgcactttttttgtgcagaaaattatccggttatttgcgtatctttggttagtcaggaaggagggacgagatgaccgaagtattaacaacccttttgcaaaagtgcgcaacggaaaaagcgcaggatctttattttcgaccactatcgacgggttgggcaattattgaacgcttagcgacaggactaaagccgttacaaaaagttactctgtcagaaggcaatcaatggctcaatcaaatgaagtatcaagcggggatggatatcagtgaaactcggcgtccacagaccggccgttcagcgatcgaggtggcaggcgaattgatttatttacggttggcaaccgtgggggattttttgaatcgggaaagtttagttgttcgtttcatttatcccattgggcagacttatcattgcgacgactcgcagattttaagtcgtttaatgcagttaattcagcaaccaggattattgctatttgccggtccaactggttcagggaagacaacaagtttgtactatcttgcggaacaagtcatgcaagataagatggtggttgcgattgaagatccgatagagattcaacagccagcgttcttacagttacaggtgaatgaagccgcagggttaacctatgcagcattgttgaaaatcagtttgcgattacggcctgataccttaattattggtgagattcgcgacttacagacggcccaacacgcggtttctgcggcgttgagcggtcacttggtactaagtacgattcacgcgcgaagtacaacgggggtgatggaccgtctattagatcttggaattagccactcacaattaaccgcttgtttagcgggtgttgcctatcaatcactagtggtcgaaggccacaatgtagcggcccactatgagttagcaactgcacaacagttggaggaggctgttcatgaagactaaaaccactgttcaattcaatactgaatttatgttgctgttagggcgcttactgcaaaatggtttttctttacaacaagcacttgagttcatgccgattgtttttccgacacaaaagcagtggctgcatcaggtgcaaactgggttagaagcaggaaaacgactagcaccaagcttagcggcggtttcgtttccaacacaccttgttgcacagattgaattgactgagttgcagggaaacttaggcgagtgtttgttacatcttggccaattacagcgaattcaacagaaacggcgtagagagttagttggcgtaattgcctatccctgttttctactcctttttctcggggcgttgattgggatgatgcagatttatctttttccggaaatcgcgcagtttaacccaacaacttcggcgacatcaccattacaactattttttagagtgatggggacattcgttattatggctggtggtctgattagtgtgtatttattccgttggcatcggcgaccgctattacaacgattggcggcggcatttagatggcccttcatcggtaaaacgttgcaggcttactatcagtattgcttattatttgatttagcgacttgcctgaataacggcttaaacttggccgaaatgcatcagcttacacatcgtttggcgaaaacatcgtggcttgtacaattaatgcaacaacttgaaacggctgtccaaaaggggggcacgctattagcgaacttagcggatggcgttttttatccacctgaactgcaattagtgctcgctaagggaagtccgttacaacagatggccaaggaggttgatctgcttgcagtcattaaatacgatgaactgcaacggcaattgaaacagaaggtgaattggctacaaccgctcttgtttatcctaattgggatcatcattatttgtacctatctcagtattttattaccgctatatcatacaatggagggaatttcatgaagaagaaaagaaatgcatttacattgatcgaaatggtcgttgtgctagctgtgatagcaatgttagtcttgttaattgcacctaatttaatgcatcagaaagagacagctgagcaaaaaacggatacggctctagtggcaacgattcaaacacaagttgaattagctgaggatgacggtaaaacggtgtcgagtctagccgatttagcatcaggtgaaaaatatttaaccaataatcaggttaaacaagctgaaaaacgcggcataacaattaaggataataaagttgttcaaaatacaaaataaggcgttcactttaatcgagagctgtcttgttttgttcattgttggagtagtcagtttatttgcgttgcaacatattcgagattatcgtgcacggcaggcggagcgtttattttttgaacaatttgaagcgtcttggcatgcgactcgcgaatatgtcgctgttgagccgcataatgtgcacttatcttgggatcaaaccaaccacacgttgcattacacaagtgcggatccacaataccaaagtatggatatcccgattccagaaacattgatgtgcgtcgatccagaaacatggtttaggattcaatttaatcatgactcagctgctagaccgcggtcattgatttgtcggtctaaaattgatgggcaccgttatgaatatcgggtccagatgatgtgggggatgttacatgttaagaagtagaccggcatttctattaatagaacaaatcgtggcgttaagtcttctcctgatgggaggcttgaccttgacaatgagtctacggcagtttaaagcacatcaagttcaacggcggtgtgctactacagaatatgctgtaatggcaatggctgccaatcgattggcaaatgagcagccgccacaagcacaatggcagttgcaacgggaaacataccaagtcgtcaccaaaaaacaggccatttatgtcacaaataaagcgggtgagcgagttgcacttcaatggtattgttactaaacgctctggatttacactgattgaaatggttgtagctctcgttattctgatattgagcagtcaattaatattggcaaccactaaaacactaacgcacacaacgcaattaacccagatggaacgtcagaatattaattggcacattagtatgattgaacttgatcgttttctggatgacgctcaatttatttcaattgaacaggcgaattatgaacagcaattaaccgtcgctaaagattcgaaacgacgctataccttaacgaaaactaagaaggaactggtggtttcgagtacgaagaatggttatatgcctctgtttgatggggtctcgcggttaaaaatggtgtatcatgaaccttttttagaactcgaagcgcgcttaagcgatgggacagcctatcaacatgaatgttttttggaggcgcaacatgacacgaaaaatacagattaaacgctctgcagtcgcgctcttgaatgcagttttgatgttgagcttggtgacaagtgcgttgttgattgtgacccacagttaccaacagcaacaacagagttacgtcagtttgactaactattaccaaacgcaaatcttgcttaaattaacaaataaagcgcggcaaactcagtcaattcaaggtataaagactaacatcggtaagagtcgtatcgaccagcaacacaagttaatcatcattgagttaaacaatggttatcgaaaacagtttccagatcagaatgaaacagatcaaggataaattttctatttgataaagcgcttactatgatttataattctaggtatacccacctgtattacttgctttgccgttagaataccgatagaatataacaggaatctaatgaatagaggtggctattttgcctaagagtgctgtagaaacgttgtttgatcaactcgatcaaacaacacaattaattgaaaagaatttagaaacaacctatttggatgcactcaccgagaccattgctaatattgcagatggtggccgcgtaaaggttgaagacggcttaccagatgctgccactgttgcacaactagaaccgctttatgcggcggttaatctcaaccaatttgaagcagaagaaattcgccaagcattacagttggcaacgctcaagggtttgcgtcaagttaaagtggaaccaaacaagcaaatgacaccagatgcgatcggctatcttgtagcttatttggcagaggtttttggtggtgctgaccaaatcaagacaattttggacccagttgttggaacggggaacttattggcaaccgtaatcaatcatatccaaaaactaacggggaataccgtgcaaggttttggggttgataatgatgatagtttgttggaaattgcgggcatcagtagtgaattgcagaagcattcaacaacctttttccatcaggatgcgattgaaccgctactggttaaaccagttgatatcgccgttgcggatctaccaattggtttttatccattagatgaacgggcggctgattttgaaacccacgctgccagtggtcattcatatgcacatcacttgttgattgaacaaacgatgcattatgtgaaagaaggcggctatggctttttcctagtaccaaatgtgattttggaaacggatgaagctaagcaactgattaaatgggtgacaaaacatgtctatttgcaaggcttattgagtttaccagcaaacttgtttaagactaaggaaggtcaaaaagcaattttagtccttcaaaaacaaggtgccggggctaaacaagtggaccaaattttattaggtgaatttccaaattctaacgatcaaaaggcgtttgcaacgtatctacagaagatccggacttggcataaagataatttacaataatcgaatagaaaaggtgattagatgtcaaaagtattagcaattaacgctggtagttctacccttaaatggaagttatttatcatgcctgaagaacaagttgtcgcacaagggatggttgatcgtttaggattatccgattcagtctttaccgttaaatacggggatggtcaaaaattctcaatgacccaggatattaagacgcaagatgttgcggttgatttgttattgaagaagttaatcgaatttaaaatcatcaatgaatatagtgaaattagtgggattggtcatcgggtcgttgccggtggggaagactttaagtcatccgcattaattgatgaagcgtcattaaaacggattgaagaattgtcagaatacgcaccattacacaatcctgctgaagcaggtgttatccgtgctttccgcaagattttacatgatgtaccacaggttgctgtttttgatacatctttccatacaacgatgcctgaagaaaattatctttacagtttgccgttggaatattatcacaagtatggagcacgaaaatacggtgcccacgggactagtcatcggtatgtttcccaccgtgctgctgaaatgttaggcaaaccattggaagaattaaagatgattaccatgcatcttggtagtggtgtttcagtgactgctattaaagacggtaaatcgttggatacatccatgggctttacaccacttgcaggggtgacaatgagtacgcgttcaggggacattgacgcatcactcgttgcatttttaatggaaaaattaaacattaaagatccagcagaaatgatcgatattttgaatactaaatcaggtatttatgggatttctggattatctcctgatatgcgcgatcttgaaaaaacgcgtgaagaacgtccagaatcacaattggcaattgatatcttcgtcaatcgtttaatcaagtatgttggttcatacgttgccattatgggtggtcttgatgtcctagtgattacagccggaatgggtgaaggtgacatcttaatgcgccaacgcatcgccgatcgcttgagtttctttggcgttaaagttgatccagaacgcaataacgtgatggctcaagaacgcgtcatcagcgctgacgattctcgcgttaaagtattattagtaccaactaatgaagaagtaatgattgccagagacgttgttgaaattggccacgtctaaggcatcagtgaaaatgaccagcgcatggctggtcattttttagtggagggaatgggaatatgacaggttttacattattttatggcttattggcaattgccttgctcattatctggctgattgttgaaacgaaaatggtttggcgtgcaaaacggaatcgactatggacgatttttttatgttgtgctggaatcctcttactaggtttaacgttagtgatgggcagaacgctcagcgatcaaatcacaggtatcggctctgttgtaattttaattgtgattgctttttggcctcgtggtttaaccaaaacaagtttgattgcaaacttaaatactattcatcaatttgcagcgatttctaagattgaattactaacacaaggtgacttagtcgaagcttgtttttatgtcggtgaaattcggattgccaagttgcgctttaaaacgacggtagaaaaattacaaacctttttaaaagaccggtttcctaagaaacgcttagtggtgaaatagggttaaagtctttcatattactggctgatatgctaaactagtatttgcatatcggggccgttacggattcgacatgtgtaggtgagcgtgagttgcacttcgtaggttacgtctacgttaacaacgttacagttaattataactgcaaacaataacaattcttacgctgtagctgcctaaacaccagcatagcgtgatccgcctgacttcacccaagggttagatccgggtctcaaattaattgggttacgttaaacgctgccgtttgaggtgtttaaaagagatttgcaaactagctagttcatccgagcttctgtcggacggcgttttggactagcgaactcctaaatcgttcgactatgagtgtagagattgacgtggcaatgcgcatggacgcgggttcaacccccgccggctccattagataacaaggtgttaagcagaattaggcgcttaacaaaaggcgattaacactaccgtaacggtgttaatcgccttttttgtttgcaaaaaaataacagccacacgtgtgactgttacattaattgcttatgcccaacggtttgtttttgttggtaagagcattaggatatagaaccaaattgtcccgataagcggtatgaattcaatgagtacccaccagcctgagcggtctgtatcgtgaagtcggcgcattttaacggataaagttgcaatccaaacaatgaagacgacgatgttacgacccattgagatgcctaaatccccaatattatagatttctgaaattggatggccggttattgtttgaataataccgatgataataccacctagaatgtagttaatgatgattggccaccagaaatcaggtcggtttgaagtgcctgagaaatcaaaaatccgggaccaaaaactttgatatgatttaaccatgatgtaaaacccccttctccttatcagcttttcgcatcgtcagttctggacgagatgagaagttatgataaatttaataacttcctaccaaagatattatgacatacttaaacgagttttttacagtttttagcttacatagagaatcaataatttattcgccaacgcccattaatgaagcaagaatgaataataaccaaatgtgaattgggtagaacaagtagaagaaatacttcatgctacgtcctttttgtccgttgtacaagaggattgggataatcgcgaagatcatcatccattgcgtattgctagtgaagagtccagtgaaggcaaatccggagttgattccagcgtcaaggaatgcgaaaacaagaacggtaagacattgtaagagccggttgtttcggaaaagataaaaaaatactcctatgtagaggagaaggccattttccgcaagcataatggttggaataaccattgcgagattggcagcaaacatcattgtcttagggttagcaattagaccaagcgccaataatgataagaggataggagcaataattgccagtccaccaagcaaaatttgtttggaatggtgcgtgcggcgaccgacactaatttcttgaatcccatacattgctaaaacggcaatgtataaatcggtaaaaatattgtttgacagtgcgaggttaccgacttcgaagaagtgttggacaatggggcttcccaagttcataatccaaaaaccaacgagtaattggaacatgtaacgtttttgattccgcgtatgtatgaatccttcaactgccataaagaagaagatggtggcaactggtcgtccgaaccaatcaacccagccagggaccccagccccggcgaacatttggtgcacgtgatcaataaacatgaggataattccaattaccttgacgtcgaagttatttaaaacttgatatgatttagtctgcataatagcctccctaaaagttaagtaagtacattatcgtatgtttagctcatattattaagttttaaatggctagtgacaataatgttagatagcaaaaaccacgataaaaggaatttatcgtggttctgagcttatttagcaatttggcttgtgccatctgcgtaatttaatgtaacgccgtcttggacgttaaaaatgtaagtgttaaattgaatgctgttatccccgacggattggccttccatttgaacgccgcgggctagcagctcattatcgttaaaaataggtgtgacacggtaacgaacaaaacgattagggtgttttttgagataataagcaatatctgattcatgggccagcatttcgggtgcgtttagctggcgtgttcctgtcatcagattctttggattattattttcaccggttagttgatagccaattaaatgactccgattatacagccagccagatttaatccgcttattatgccaaccggtcggattccaagtgagtccttcgcgcttggcagtaggcatcatcgattgatttaaaagaacatttgcagcaccaacgcgatttagtgcgtcgagattactaaaggtttgccaaccaccgtgatcggtagccaaatcagtagcactgaagcttggttggttattattgacgagtacctcgttttcaccacggtaggtgagggccgcgagctctgatgtgttatgacgctcaggaccagtcgtttgcatttgttgctgatagttagtgagttttttgtttaactggttaattttacgttgaagcgcattaatttgacgttcggtttttttgttgtgcgcattaatgcgcttggtttcttgacgtaaggtggtagcgtgaacggtagttggttgttgcaaaagggttccgacaccagcaagtgaaattgttaccaccacgcgacttatcaaacgggttgctttcattggctaatcctcccatccgcaaagggtatagccttctgcttgtgcttgtgacaatggcatggttgtagtactgttggcacgacttaagccacggcaattgggatcaagatggtattttttaccagaattaggggcaattgtcaccatttgttcaacttgttgagcactagcagcttgttgtgcttgttggcttgcctgaattgcagcctgttgctgagcggcctcgctagcttgactagtagcggcgattgaggctgaagccgcacggactctttctgactcagacgctttttgctgctttttaacaagtcgtgattgactggcaacttgttttgtcagttggctagcctctgttttctttgtagctagttgtttttttaaagcgctcgagttagcacgggccgccttgttttcgcgtacatcaacttgatgttggctggtcttcttggaattcgcagcagccaccggcattaatgaaccgcctaagccgattaaggcgatgatgataatcagtacgcgacgccattttctgggtcgttgccggttaaagaatagtagtgaaatcagtgcgctccccaagaacgctaaaaataaataggacataataacctccaaagtaatgaataacagttcttaacgattgtatattgtacataatatgaaagcaattataaaaagcctaggcgtacctaggcttttagcggttaatctttagttgtgagtgaaacaattgcttttgtttgatagtatttttcaggattggtttcaaaagttaaccaatctgcatcagcgaatagaccagccaatgcaagaattgggcgttctttagcgagttgttgttcgctagaagttgcaatggcgtcttggtagctaccattgaagatttcatctagataaaaggcttgatcatcaccaacgtttaaataggtagtatcattcttccaagcatgtagcaaatccatttccgaaaaagtaacggtttcgttatttgaaaaagtcatgataaattgcatatgggtcaactccaatcaattaattaagcaacaatctatttggttgcctgcctaaattatagcatttagataataaaaggcgaaccttttgacagtcattgtggttaaaaagtagaatgaaggtgaacaaaatagaaaggaagtcattgatatggcaaacgaagaacgattagatagtttgaaaaatgtaattgaaggcacagttaagaaggttgtcagtgaagtgacacctaataaagataagaaagaaaaggcgcaaaaagctgacaaaaaataggacttagtaatgaagtaaaggtcaaaatcatccgtttggttttggcttttttattggaaagccgttaaatgcgttcgcttttacgaggcaggcttggtataatttaaaggatagtcagaggaagtaggtacaattaatggattacgcaggaatgttagaccggcaaaagcacattcgtaatttttcgatcatcgcgcatattgatcatggtaaatcaacattagctgatcggattctcgagatgacggatactattgccaagcgcgatatgcaagcgcaagtcttagatgacatggaattagaacgtgaacgtgggattaccatcaagttaaacgcggtggaattacactaccatgccaaagatggcgaaacttatattttccatttaatcgatacacctggacacgtcgatttttcatacgaagtgtcacgaagtttggcagcttgcgaaggcgccttattagtcgtcgatgcggcccaaggggttgaagcacaaacgttagccaacgtttatttagcggtcgacgatgatttagaaatcgtccctgtcattaataaaatcgatttaccatctgcacaaccagacgttgttaaagcagaaatcgaagagatgattggtttggatgcttcagaagccgtgcttgctagtgctaagagcgggattgggattgaagaaatcctagaaaaactggtaacggacgtgccagcaccaacgggtgatttaaaagcaccattgaaggcgctgatttttgattcgatctacgatagttatcggggtgttgtgttaaacgtgcgggtttttgatggcactgttaaagtcggcgataagattcgcttgatgaataacgggaaagaattcgaagtcactgaagtcggtgtgatgtcgcctaaagccgttaaacgcgacttcttaatggttggtgatgtgggttatattacggccagcatcaagaccattcaagatacgcgggttggggatacggtcacccttgctgacaatccggcagcagaagcccttgatggttatcggcatattcaaccaatggtttattctgggatgtatcccgtggataacgcgaagtttaacgacttgcgtgaagcccttgaaaaattacaattaaatgatgccgcgttggaattcgaacctgaatcgtcacaagcattgggctttgggttccgttgtggcttcttaggcctcttgcatatggatgtcgtacaagaacggcttgaacgggaattcaatcttgacctgatcatgaccgcaccatcagtggattatcatgtcgatttaaccgacggcacagaagaagtgattgataacccatcagaaatgccagaaacatcaaatatttcagaagttaaagaaccgtacgttaaagcatctatcatggtaccgaacgattatgtgggggctgtgatggaacttgcacaacgtaaacgcggcgaattcgtcacgatggattacttagatacctatcgggttaatgtcatctacaacatgccactgtctgaaatcattttcgatttcttcgatgacttgaagtccaataccaagggttatgcctcattcgattatgaagtgactggctatcgtgcgagtgatctggtgaagatggatattctattgaacggtgaatccgttgatgccttgagttttatcgtgcaccgtgactttgcctttgaacgaggcaaagcgattgttggtaagttgaaagaaaccattccacgtcaacaattcgaagtgccgattcaagcagctatcgggaataaagtgattgcccgttcaacagtcaaggcctaccggaaaaacgtgctcgccaagtgttatggtggggatattacccggaagcgtaagttgttagaaaaacaaaaagccggtaagaaacggatgaaatccgtgggttcggtggaagtcccacaagaggcgttcatgtccattttgaagatgaatgatgaagataaagccggtaaataaggattcttaaaaatttaatagtgataaaatagcagttttgccaacattttgccaacgtcaattttcgttggttggcaaaactgctatttttttgtgtttcgaattattcaagatagtgctcttgccaacattactcgttctgaatttgttcgatcagactaactgtatttttgcgcattttatgagtgacatgagaataagtgtccattgtagtgctgattcgagaatggcctaaacgttcactaacgactttcattttttctccggcttctagcagcatagtagcgtgagtgtgacgtagtgaatggaaattaaaattcttatgcaatttgtcttggactaattgcgccttatatttaatcgagttaggaaggacgggggtaccattttcttcggtgcacacaaagttacaatgagaatttacggttgaaagctgaggttgaacagcggaagaataataagtactggttgtgggcattagtgccaattgtcgcgattcttgctggcaacatgacctcattttcacggatgttcatgcatttttgtagatagttcacgatagattgcatagaaataggcgttaagcagattatgaaaactgcttaacgcctattttttattggcgactgtgacggtagccgtaactgaagtaaattgttaggccaatcaccaaccagattaagaagacaatccaagttgttagttgtaactgggtcatgagtagtaagcataagccgcatgaaagtaaaggaatccatgggaatagtggcactttaaacccttgtggcaattcattataaaatggtaacttgcgcaggaagatcacaccgagagaaacagttgcaaaggcgaataacgtgccaatgttgaccaattcagcaatcttatcaagtggcactaccattgcgacgatgcttgtgacgatggcgaaaatccatgtattcgcaactggcacatgtgtttttgaactgactttggcaaaaacgggtggcaatagcccatcgcgactaatggcgaagatcagacgtgttccgccgtaggtcataacgagtaggacagttgtcataccggcaactgctcccagggcaacaatcccagcaacccagttttgatgcatcaattgaagcgcaaaagcaacggggtcaccaacgttgagttttgtatagtgcacgacgccaacgaggacggtggcaactgcggcatacaataatgaagcaatcaataatgaagcgataatcccgattggcatatcacgttgcggattgacaacttcttctgatgcggttgaaacggcatcaaagccgatgtaggcgtaaaatgctaatgctgccccagaaagaatgccaccagcaccaaatggtaagaacggtttgaagttggctggtttcacatagaaaatggcaacgccaaggaaaattacgatgacagcgactttcacaccaaccataatcgtattaatccgtgttgattcgcgtaagccatttgatagtaagaacccaatcaataacgtaattaaaccggcaattaaattaataccaccagggtggccaggcgtccatgcagtcgataagaaggtaggtaagtgtaatccaaagccagcaattagattttggaagtaggctgaccaactgacggccactgaggcgactgcgaagagatattcggaaataagtgcccaacctagaatccacgcgattaattcaccgaagacggtgtagacgtatgtgtaggcactaccggccaagggaattgtagaagcgaattctgaataacaaagggcagccattgcacagacgactgcggcgagcaggtaagacagcatcgcaccgggtccagcatatttagcggcgataatccctggtgtgataaaaataccggcgccgacgactgcaccaacccccatggcggttaaaccaaaggcggttaaatggcgttctagtgtactgtttttaaattggttcacgtcgatttgttttttggcaaagagtgaatgttgtgtcattagtaactcctttttaagtgagatggttctaattttaatcggtctactgagaagtgtcaagataaaaaaagcgccatgacagtgattgagccgtcatggcgcggattagttaagtgattaaattaagccccagtggcgtaaaccttcaataatgccaccttcagtattcttagaagtaatgtatttagccttggctttagcttccggaataccattgcccataacggtgggatagtctacgaagtcgagcattggtaagtcgtttgtaccatcgccaaacgcataagttgggatgtccgttaagttttgtgagcgaatcaattctttaataccggtttgttttgaacaatctttttcaaccgtatcaattgagttcggtgtgttgcggtagaatgttaagtcggtacttagtgtttctgtataggccttgtcattgtcgtttgttagaatcaacatcatgtagactggatgattcaagtaatagtctggatcaacttcggggacgggggcgttgacaaacttgtaggcatctttgccgggttgagttacagccgtaatccggattgcttcttcattataaaaagcgatggcttcgtcagcagcattagcaattgcgacggttttttcaatcacgggcgttggaatagtgcctttataaacaggttgaccttcatattgaatgaagctcccatttaaacaaatgaatgaatcgatgccggtttttgcaagtgcatcttgaatttcaagcggtgagcgaccggtcgcaatgattggtaggtagttgttggcgcgtaattggtggagtgcaatcgcaacagctgcatctacttcagaatgttcgttgtaaagtgtaccgtcaaggtcgaaaaatactagtcctttataagtcaaaatggggcctcctaaataatgatatctgcttaacatgctatcatgcttagcgataccatgcaaacgggaaccgtgatgcgtttgattttcatcacttcttcatatattattcatccgtaattggtttatctactgtataatatagacatagcaacgtaaaaagagaaggaattctaatgaaaattttaatggtagaagataacaaatccgtatcagaaatgatgagtatgtttttccaaaaagaagcttgggatgcccatttcgcttacgacggcaatgaagcagtggaagcctttagtgtcgatccagagagttgggacattatcacgcttgatttaaatttaccgggtttagacggaatgcaagtcgcccaaaaaatccgcgagttgtcgaagacagtaccaattattatgttgacggcgcgcgattctgaaagtgatcaagtgcttggccttgaactcggtgctgatgattatgtgacaaaaccctttagtccaatcacactgattgcacggattaaagccttacatcgccgtgctgagttgattgatgaacaagtcgaagcagctgaagaaaacttacaacaagcggctgaaaattcagattttgatgtacaaacaacacactttaagttgagttctaaaacgcgtgagacttatttattggacaaaccaattttagatttaacgccaaaagaattcgatttattgaagacgttagctaaaaatccccgtcaagttttctcacgggaacaattattagaacttgtgtgggattaccaatacttcggtgacgaacgaacagttgatgcgcatatcaagaagttacgtcaaaagattgaaaaagtaggaccacaagtgattcagaccgtttggggtgtcggttataaatttgatgattcagacgcagcgcgcgaatgaagcttatttatcaatggatgttggcatttttcggcgtcattatgacgaccattattattgtggggattgcgtttacgcaatattcgacaaggaccgcttatgagagcacctgggatcaactagaaggttacgcggatgtgattgaacgtgaagctttcaaacaggggtctcaagcggccttgtcgacccaattcattattgatagtcaacaaatcctttcccaacaacacgttgggtttaatttctttaacgccgaaaacgagatggtgtatcctaccccggatcctaaagtttcggtcaagaaacaatattggaaacatttaaagaatggccagattcaacggctgagcttaagtcgtgattcgcaccaagtgaataacaataagcaagaacagttagtggtcttcaaacccgttttttacaataacaaactgatttacgtgattggggtggcagcaccactacaaaccgttaaatctggtttgacaacgatgcgcaagaacctcttgattgcctttttactatcgacaatcggtgggattctgttgagttacgtcttagcacggtatcaaatttatcggattaatcgcttacgaaatgcgacccacctagttgctgaaggagattttaatgttcagattaagaatcctggtaaagatgaattggatgatttggccaccgattttaatgagatggtgcattcgttgaatgaatctgaagaggaaattaagcggcaagaagatcgccggcggcaattcatggccgacgctgctcacgaaatgcggacgcctttaacgaccgttaagggtctgttagaagggttgcaatatgatgcgattccagaagagatgcgcgccaagagtatttcattaatgcaaaatgaaaccaaccgactcattcgcttagtcaacgagaacctggattatgaaaagattcggactaaccaaattaaattgaacccgcaaacgtttaatgcggtggaagctatccagaatattcaagagcaactcgagaagaaggcgactgaagccggtgatacgctcatcttggacgcccaagagaatgtcccaatctatgccgactatgaccgttttgtccaagtgatgtttaacatcatgcaaaatgccattcagtttacagaaaatgggcaaattacggtgactgcggaagctggtttccacgaaacaatcttaacgattagcgataccggtatcggaatgacggacgaacaagtcaaaaatatttgggaacggtattacaaagcagatccatcacgtaagaataccaaatatggtgaatctggtttagggttggcgattgtccaccaactcgtccagttacattatgggacgattgaggtccaaagtattcctgaacaagggaccacttttaccttaactttcccagatgaaacgattgtgacaagtgaaagctaaaccaatttaaataggcgtcacgacaaggattaaattgtcgtgacgcctattttttagattaaatatgcaattgcgtttgagctggttgggtttcactgatgatttcgccagcgtgcattgagagggtaacagcggcgcgcttgttgagagcctcgtagaagttgtcgctatccattagaatcaggtgggcgggtttacccacttcgagaccatattggtcaaggacgtgcattgcacgagcaccattgtaagtaatgaagcgataggcattcatgatttcagtatggcccatgatttgggttgccagtaggccactatacaacacatcaagcatgttgccatcgcccattgggtaccatggatcttgaatatcatcttcaccaaaagcgacgtttagcccgttggcagtcagttcttttacgcgcgtcaaaccacggcgcttcggataagtgtcaaaacggccaccgagaaataggttgacaagtgggttggcgatgaagtttaaatccgccatttttaacagccgcatcaatttgtacatataggcatcgttgtaacagcccatggcagttgtgtgtgaagccgtcactttgtctttcatccccgtttcaagggcgagagtcgcgactgtttcaagactacgtgaattgggatcatcaatttcatcggtatgtgcgtcgaatagtaaatcatattcttgagcgagttcaaaagcaaacttcaaggattcgacggcatattcgcgattaaattcgaaatgtggaatagcaccgattgcatcaacccctaattgggcagctttggtcattaatgctttgccatttggaaaagaaagaatcccttcttgaggaaaggctaccagttgcaacgtcatccaatccttgacttcttcgcgaacctcgattaaggctttgagcgcaactaagtctggatcagtcacgtcaacgtgtgagcggacgaattgaatcccatggctggcctgtaattttagtgcttgaattgcgcggtgtttgacgtcgtcgtgggttaaatcctttttgcgttcggaccaaatccgaatgccatcaaacaaggttccagattcattccattcaggctggccggcggtgagagttgaatcgagatggacgtgaggatcaacaaatggcggtaatgccaattgaccatgtccgtcgatgacttgctcattaggatgcggtattagctgtgcctcaattgctgtaatgatcccgttttcaattctgattgactgcaatgattcttgattctcaatgtgcacgttttgaatgagcattttatccaacctcgctttttttattagtgagtataacaatcatgagttgactttggcaagtaagtttaatacaatgcttataaatataaatccttttaagggcagtccagtgaggctgacaaaggagcggttaacaagtacattagtggacctgctctgtctaggagtaggtctttttttaatgcaattaaccaagtggagggtatcaaaatgacaaagcaacaaacaattcatgcagtatccaaggacgcacgaacgatgggcagttgggatttgttcgcaacttggattggtgcaaatgcgaataacggcacttggtttatcggcggcattattgcggcaactggcttgattcaagggtctacgttgttactagttgttggctgtttatcgtacgtcttgcttgcactggcctcctacatggggtatcaaactggtgtgggggcgatggggctaacgcgggcctcatttggcgtgaagggatccgtcttgccatcgattatcaatgtggtacaattcatcggttgggctgcggtgaatacgtatattgcagcaacttcagtgagcttcatcatcaaggaaatcatgggctggtcaggcaacgatgcagccactaaccggatgagcttgattgttgggattctaattatgtctgtcctgcatttaatcagtatttcgctcggtgaaaaatccgtccgctggattgaacgaattggcatcatcttagtgattatcttagtcacttgggaatcaatcattgtcttcaaaatggtaccgttcaaagacttattggcgtggcgaccagccagcaacttacggcttgaatttgggaaggcggtcgatatcctagcagcgtttaaccttgcatgggtaaccgctgctgcggacttcagtcgtttttcaaagaacaagaaagcagccacaggctattcattcttaggcgccaatattggcctgttctggtttgctttcatcgggttaacggcgacaattgccacagcgattacgttaaatcattttgacccgaacaacgcggatccaagcaccattgcggccaaattagggttaggtgttttagcgttattagtgatcgtgattaccagtacgacagctaatgcggtgaatctaatggctgcgggatcggctttaaccaatatttttccgaaatttaaattaacgccggcattgtgggtcgtgacgttattggcaacggtgatgacctttatcccggtctatgttgcctcatttttaaccactttcgaaaccttccttgatagtattgggatgttcttaggacctgaaatcgcagttttcttggtggattacttcattattagacggtggcactacaatgttggtgcgctcaatgaagttgctggaccatactggtacaccaaaggatatcatctgacagccatgattgcatgggtcattggggtggtcagctacttggtcttaaatcaattcgcgattattcacgcttatacgggggcaacgtttatcgcaatggggctgacagcacttgtttattggttaatgattcaaagaaaagaaaagacaatttaagggaactaaaaaaacgtcttaattaaggcgttttttttaatttttaccacagagttcatataattttcatactttagttttacactatctttattaggaggtgggtcatgttcttcattaaatcaattccagctaatattcggtattatttacgccaatctttgttaatctatctcgtggattgcctctttttaggcgtcatgctgattgcgctgagcttgatcagtttagaacgacatgacctcaaccagttgaaaaagcaattagccaactttaacacaactaaagaggggactaaccccctgacacatctggttcaaagtaaagaagtcttactgggacgctatcaatttatcgcggtagtgctgactatcgttatcgcacttgtgattggtattttgacttggcaagcgtttaagaagatgcgtcaggatatcgatactttcactagtgcgaattggtcgcgacatacaattgtcaattattatacgttaacggcgctttgcttactaatcagcgcaagcgtgacagtgattttaggttggttattagtcaattcctactattggcgcggattagagctgattaatcaacagtggctacaaaagccgttgcgaccaatacaaggtccccgagcatttcaaccgttatttaaaaatcatctgactgactttagtagtcattcgttattgaatccgattttgcatgagagcaccaagcagaatttaaccaatcaagtattcgcccaactatgggcaccatttatcagtctaattgcaccagtctacattattggttggtgccaagttactcgctttaggaaaatgagaaaggcgtgattgaaatgctaaataaacaacccttagcacttggacaggtctattttagtcaaccggagatgattcatcagagccttgaatcacctgaacccccatatgtcattgattatgaggcgcctaagattctaccctttatgtccggttgggataacttgttgcttcctaaaaagcagcttgcaccaacgttaaaaatgttgattgaacagcatttaaagcgcagtcggagtttattgggcaccgaattaccgccagtcgatcagttctggattcaattgattcgcggtttagcaagccaccagcaactcgtggtggtcaagcatttcttagatgaacttccaccaacggatgctcgccaattattaaatgatgtcagagcggtagcagcgcagtttcaaattatcgtaatcatgacaacgactcaggaatccgtttttaatagttttcaatcgcaggtgattagctaacgtcaaaaaaacgcaaggacaatatatgttgtccttgcgtttttttttgacgattattccgtatcgctagttgttgttgcatcagactcttttttcagggcctttgattttggcacttccgtgaggcttgattgatcacccgctaattctggagcatcggttttaaagagcccaacagtcgattgatcaccattttgcgagaataaactggttgaattagcccctaatttattttgaatatcgacaagctgttgatagccagtcagatagttataatcggcagggttcactggtttaaaactttgtggtgtatagaaacgtaataggttcttttcgttaactgaatccgacaaactcaattcgtggttcacttgtttctgccaagcagcgacttgtttttgcaacctagctgttggttcagttacttctgtcccatcctgattattgtagatggtgccatcgagtactgtgtaatcaggggtgacaaagttatggtttcggaaagccacgacttgatcatgttgtggtgataataaatcggtgccgaattggacgtaatttttattatcaatcccgagtaagtgaagcattgttggtaacgcatcgatttcgccaccatattgtttttggataccgccttttaaaccgttcatgtgaatcatgtaaggcacacgctgtagttgggcgttatcgtagtcggtccacgtttctgggtcgcggcctagtacactgagtaaggccttattatcagaattcgaaagaccgtagtgatcaccatagaggacaatcattgaattatcatagagcccagaggctttaagataattgaagaactcttctagggattggtcaagataatgggcggtcgcaaaatagttgttgaccgctgtattatcagttgtggcacgggggaagtcaccgtctttttcgggtaatgggaatggaaaatggttggtgacggtgatgaatttcgtgtagaacggctgttgtagctgttcgagatacttaatcgattcaccgaataataatttgtccttcaagccgtattgtaagacgttatcaggatcggtgttaaagtaggaagaatcgaagaagtagttgtagccaaagttcttgtagacgttattgcggttccagaaggtgcccacattaccatggaaaacggcactcgtatagtcaccgttttgcttgaggattgatggggcagcttggaaggtgttatccgaaccaagcgttgtaaagactgagccttgtggtagaccgtagacgccggtttccatcatgttttcggcatcactggttttaccttggccaacttgatggaagaagttttcaaaacctaatgtattttgatcatgatagaggctatttaaaaatggcgttacttcgcggccttcgaacttaaagtcgattaggaattgttgaaaactctctaaatgaatgacaatgacgttcttgcccttcgcaacgcctgcgtattcagcgttcggtgcagcgtaatgctctttcataaagtcgagcaccggatctaagtcgtaactctcagcttgggcacgcacttgattattctgagtagtcttgaaagcatcgtagacggtgaaggtgtcgatgccgaggtacttaacgatgtagttccgatcaaacgtccgtgataaaatttgaggtcggctgatttcacttaagccaaggttgatgccaaataataagacggccaatgaggtaatactgaaggcccaccaccgattaaatgcgtgtttgtcgatcttgatgaccttggttaaaatcagcaaggctaagacaataatatcaatccaatacagcgcatcatgccagttcatgagggccagtgaacttttgctgagcccagccgaaacttttgaataccctaagatggtgttgatggtcatgtaatcggtgaattgccggtaatagatgacattaaaatataaaagagcggtgttggcggcatagataatcaagcccaaccaataactgagatgcggctggcgaacataaagaatgatgccgaataaaaggagcgtcgtcgcgaccggattaaagattaaaatagcaatttgtaagaagccactagctgcgaggttaaaatcggtgaagtacccgaataacgtttttagccaaaataaaaagactaacaaactcatgaagcctaatctcgtggataggaatgatttaatttttgtgagtttcaaataatgtgacatcctttcaaaaaacagaactaaaagagcgctaatgccttattttaacccgagggcggcattagcgcaaatagcagtttaaagtttaaacagaaacttaacgtttcgcgggccgcatgatggcatcgtactttggattcagttgatctggcgccaaaacatgttgataaacggcttgtaattcatggccgatttctgtaatactcttagactgcgcagtttggtagccttgagctgttaaatcgggaacggcattagtgaccattgcttggatgagttgactgaattctgcgttagtgtggcccatgtagcagttttgttgatcggcaagccagccatggtaaaccggaatatcgcgcaccaatactttttgatgacttgcaagggcttctaagacgacaatcccttcagtctcttcataagaagggaagaaaaataagtcagcattggcatacgcaccttcgataatatcgcctttgatataaccagggaagatgacgttgtcgggatgatcctgtttgacaatccggcgaatattggctggaatactgtacatgggtacatctccaaaccagataaaggtgtattcgggtagacctttggcgatttcgacaaaatcgagaatccctttgcgtttaaagaagaggccgacgcagataatcactttttgatcaggctttaaatggaagaaattccgaaaagcagcttctttagctggtgtggcttgatacttagctaaatcaatgccgtttgaaatgggagcgatagggttggttagaccatagctttccaataatgattttgaataaggggtgggggtaattaagtggtcggcttgttgatagaggctaacgaggtaccgtttaacaaatggagcgagttgattggaaccaacaaaggagttgcgaaaatcttcttcggtcgaatgtgcatgataaatgacgggtttccccattttacgcgcctttttgatgacactgcggcttttgagtccgtatgtattgatatgtaagatatcgtaatcttgatcattcggatcaagcgtatagtcaatccccatttcggttaacgcgcgtttttgatgatccaacgcccgcccaattccagatttagcgagtagtttttcactttcaaaatataatagaactttcataaaaggctcctgtttcaagttatagtaatttctattatagcatagcacagtaggcacacatcgggctaaagttgggcagtcgatacctaatagtttaagattcactttagtcgagtaattaagcgttatttattgaaaaaaaacagctataatggacttaattactcattgaataatgaacagataggttaaattagtggaataagtgaggttggttttttggtatttcttgggcgtatttatgaacaatggatcctcccttggggggaacagtataatcatttaccactcatcaaattgacggtggagagtttagataagacgattttgtattgtttggtttttattgtgtgccggttagggtacttattaatgaaacgacgcaaaatacagcttctcccagaactgaaactattgttatttgtgttttatattgccttattggtctcattaacggttttacggcatatttattatccgtggcaaatgcagctccatttgcaacgaccacttagccaaattaatttgacaccgtttgttgagactttcaagttacggcaagcgcccgcccagattgattattggtataacttctacgggaacattgcgtggtttatcccgtttggtttattgcgacggtcattgacacagcgcaaaggggattggttgattacgattattgaaggggctctgttatccctgtgtattgaatccgcccagtttgttttagggactggcatggcagatattgatgatctcatgtttaatacattaggggtgatgattggcgtcctgttatatcaagtcctacaacatgcaaagcgaaaacattaaggttatcaacggtaagaaaacgcttatcgttgatttttttactaaaaaaaacgcttttttacgtaaaatttacgtaagcgcaatcacgactgggacagttgcttacatgacggtagtgaaggctggtaacgattgaatggtgccgttttcctactagccagcggatataaaactatgtataatggattcttgtactttagagaagaagaggaatttataaatggctattttaattgcattaatccctgcacttgcatggggtagtatcgggttagtgagtggcaaacttggcgggaatgcctatcaacaaaccttaggaatgacaattggtgcgctggtttttggaatcggtacctttttagtattacaacccgctttaaacttacggattatggtaatcggtatcatttccggtttattctggagcattggtcaaggacaacagttccaatcaatgcaagcgatgggtgtttctaagacagtcccattatcaaccgggatgcaactgattgtaaacactttagcaggagctttgttattccatgaatggaagacaacgcacgattacatcttcgggattactgcattagtgatcttaatcgctggtgccacgttaacttcaatgaaggatccgaagagcagtgttgctgctaaagaagatacacaatttgcacgtggttttagagcattaatcttatcaacaatcggttatggtggttacacaatcatcgttaactggtcacacattggcgcaacatcaattgttttaccacaagcaattgggatgttcgtcggtgctgcaatctttgccggtgttggcattgggacagcggtcttcaataagaaaacagcactcaacattagtactggtttattatggggtcttgggaacttatttatgttgatttcaatgaatgatattggtctagcaattagctattcattatcacaatgtggcattatcatctcaacaatcggtagtatttacctattgggtgaacaaaaaacgaaaaaagaaatggtttacgtcacacttggctgtttattagtcattgtcggtggggtcaccctcggtatgatgaagtaagcaacttactaataagtcacctagacaaattgtctgggtggcttattttgtttagagtgtgtattattctatagaaaaggcaaaagaagtgagtcagatgaagagaacaaataaaacagctgtcagttactatttattgagtgtgctagttcccatgttattaatggtggggctatatgcaatgctccaaattgtgccgtttggacggcataatttattgattagtgatctcggtacccaatatatgccctttttggcagagtttaaacggcaaatggcccagatgaatttcagtacgtattcattttcactttcactgggtggcgatatattaccgctagcggcttattatttaatcagtccttttaatttactgctcctattttggtcgaatagccagttgccagtggtggttgggtatgtcattattttgaagattggggcaatgggtttaacgatggcccattttctaaagacgcgtcagcctgaatatcatttttccgcgctaatttttgcaacagcttatagtttaagtggctttgtggcaatgaacttttataacctaatgtggttagacgctctgattttcctcccactggtcatcttaggattagaacggctatttttaaaagggcgtcctggcttatatatctggatgttggttgccactatctttaccaactattacttgggttatatgtcatgtctatttgccgttttgtatgcaattagtttgttaatcaaatggaaacaaccccaacagtcttggtggcaactagtggttcactggcggcaggctatctggcagttttgttgggcgtcattgattgcggggggcacaacagcagttgtattattgccgtcgttacttggaatgttgaagactgggaaaaagacaatcgctgcaaccagtttttatccaaccccgcagtttggctgggaagttttgagccaatttcaagtcggcggcagccattatacgcaacgcttaattcatgaaccaactttatttatcagtacattagcgctgttatttgcggtctattatttctgtctaccaaccattcgacggcaagcaaagtggtcgaacggctttttaattgttagtttagcgttaagtttctgggtaacgacatttaatacgatgtggcacatgttccagcaaccagaagggtttccatatcggaatacctatttgatggcatttgttctcatcaaaattgcctatgaagcaagtattgaaccaatcggtaaacgtcaaacgaaacgcctggttattttgatagtcggtggcttgctcagcattggccagttggcgctctactatgggccacatgtacgtggtgtgcagaaacaatcgctctggttgttaatcggactaatggttttggctagcgttatttttgcagcgtggcaaaaaggagcacgttggcaaccatgggtgattggtctgggaaccgtattgacgtttagtgaactggtgattaatggccgcttgacgaccactaagttaccgatgggcgatcaagttgtttatgcgcaacaataccaacgccaagcagcactctttgaacagcttgaacggcaaacacctgatttctatcgcgttaataaccaagcgattctcttaaaaaaagcgtttaaggaaccgtattatgggtacaatgatgcgttgacctttggacagtatacattgaacaattattcttcgacacttgatgagcggatgcggacgatgttggttaatctcggtttttatagtaagaatgcccggcggattaacgggattgggcatactgtgctgactgatctgctatttgccaatcaatatgacctaattgctaagcaaggacaggttgtgacacaaccccataaaacgttaggcttagggtttgcggttaatgaccagctagcacacgtggctttaaaagcacatgaaccgtttgaaaatcaagatcgaattatgcaggcgatgacggggcaaacgacaccattttatcaatataatcaattagatttacaagcgcaaaaacgtcggcaaattacgtttacaacgcaagttaagacaagtggatatgcttatctatacttgccgcaacaaaacttatcaaagctcaaagtgaaaattaatggccgaacacataaagcaccgattgaattgaatgggaccacgattattggtttgggtcgctatcaaaaagggcaacaactaacgctgacaattaccagtcggcaacctaaagcctttcgtaagattcaggtggctagtttagaccaggttcatttcgatcaagcttttgatcagttggcacaacaacgcttaaagatcgacctaaaacaactgtcggcagataatggtcggattgctggtgtagtaccagctaagaccgctgatcaattactttatctaagtgtgccgtatgacagtggttggcatgcgcaagtcaatcatcaaacagttcgtacacgacgagtgatgggcaatatgcttgcagtgccacttgagaaagggactaaccaagttcgcttagtctatcgtgcgccgggactaattatcggcgcgatcatttcaacatttagtttaatgacatggggacttatcttaattaagcaacgctggcattaaaaaagcaggttaacgatgacaatcatcatcgctaacctgctttttattgtggcttatttggggtgtagttgagtggctaagccgagaccaattaaggtcaggccgagcaaactaacaaatacgacttggtaaccggcgacacttaaaaggagagttgcaagggtgacgcccagcgcgcccgcaatttgacgaatcgtggttgtgacggcagttccgtcagcgagcacttgatccggcaggctattagcaccaagtgtaacagcaggcatcatgacaaatgcgttgccgccttcgatgaaacaggcacacaggatcatcaatggtaatgacagccattggtagaagccaatcaaagctagccatccaatgctaatcatggttaggccaacgagtaaggtcggtttaaagccaattttatcagctaaccggcccgcgagtggattcaaaaggcttaacacaacggcagcagggaccaatgctaatcctgaaagaagcggcgtcaacttcaattgagcttgaaaatataatgggtagatgactgtggtgacaatcaatgaaatataggaaatagcagtcaatccgaccgcaatatcgtagttaaggtaaccgagaatatgtaaattaagaagtggcgttgtctgggtgagttgccggtagacaaaataacccagtgctaggcagctcactaatccgataccccagagtccgattgggttgatagtaggatgattagcgctactgatgacatataataaaccgattaatccagttgtacataaaacggaaagaccatcaaggtgatagggcttagccggcataatatcagaaatagtgaagttagctgttgctaacacggttaagataatcagaataaaggcgatgaatagtcctcgccagctgaagtagttgagaataatccctgaaataatcggcccacaagctagtgcagagcccattactaaaccagccaggcccataatttggccccgttgattttcagcagtaatggttaataagacagtttgaaacgatggaaataaaacacctactgcgatggcttccaacgcccgcccgaacaatacccaaccgaactgattagcgaagacaattaatagcgttccaatagtaaataaacttaaaatccccatgtagagtcgtttgaatgggatgttgtttaataaccaaggactaatcggcatcatgacacacattacgagcataaaaccggttgtcagccattgaacagttgtggctgataaatcaaaataggccattaaggttggataagcagttgaaagggcagattggctgatagacattgtgaacgtgccggttagtagggtgaatgtaaatagttttagtgctgttccagatagataacgttggttggacaagtaatcagatcctttttttggcttaccttaactataggacgtcatgttttatttgtaaaatgaaacgcaatttgaaatcgttatcggtaacaaaggctaataattagccttttatctatacttagtatatatttatactcatgatgagtatttagatattatattaaagggggaacgaccatgagtgtcaaagcggatcaactatcgactcaggaatacatcgtacggtggaatcaatttttagaacggtttatcgtgtttgaaacagtatttagtgagtacacccggaccagcaagaacatcatcaaagggcgctgtctggtggacgaaaatttggaatcgttaaacgaatattttcaacgtaacttacgggtttttaaacaatttattgatcaagccacattactaaatccgccaaaagaattacgagaaattaaccgtcagttacaattagtaatgactgattacgtctcgtccgctgaagccatggtcaccgccttcaacgagggtgatgagttaaacttatatcagaaactcacaacgagccgtcaacaacaaaagagtgatcgaatacgcattagtgaacttttaaatcaaatcgctgtttttaaaacacaggcagtcaaataaaaaaacgacacccatctggcaactctcagccggtgggtgtcgttttttttgactagataattttacgccgagcatgttcgataaatttaaacttatcggcacggtgaatcgattcggtgaattgaaggagggtattatcttgtagatgggtgacacctttaacactgactacggagctgttaggcggtaggttcagtatctgacactgttcttcagtggcgggaatcaccgtgaactccttactgccatacccaatttcgagtttgagtgtttcttcaaagtaacgatagagtgagtcttgtgcaaccccttttgaaatgtgggggactatgctagttaagacgtagtcgttatcgattaccaggggctgaccgttaacgacgcgcagccgttgaatgtaagtggcaggtaactgctcttcggattcaagatggaaaagggtttggggaacggtcgtctgtgttaattgcaagacttgagtgtcagtatgcatatcgaaaagactatctaattcacgataactggtcaatcctgaaatcggaaaagcatacttgtctagaccgagaaccaaagagcctttccctttaattttatggataaagccattttcaagtagactacctaatgctttgcggacggtttcacgcgacgcaccgtagagttcagtgagttcattttcacttggtaagaaagtgccgctttgatagagttggtgcgtaatcttgcgcacgagatctcgataaatcatttcatattttttagccattcgatattctccaatttgttttctcattcctatcataacggggattcggtgaagttgcaaggttagattaagcgctaacaagaaaacggttttaaaaagtgttgaaaacttgtacgtacatgatatatgattacggcgtactgagaaagcgcttttattcatgctacttttaattcaataagattcgggaggaattattatggctcaaaaggattattcacaactcgcacaggcaattgtcgccggtgtcgggggtaaagaaaatatcgatagtttaattcactgtattacacggcttcgtttttatctaaaggacgaatcaaaagcgaagaccgaagaaattaaagcattagatggggtcattaacgttcaaaaggcctctgggcaataccaagtggtcattggcaaccaagtcactgccgtttatgatgccgtgattgcagaaatcgggacagagtttgctggcgaagatgaaacggcccaagttgtggctgcaacaacgcgccaacaaaatttaacgccatggggccatgttaaagaagcctttaatcaattaatcggcgtgattaccggtgcgatgagtccgattgtcggtatcttagctgctggcgggattttaaaaggtgtcttggcgatgctaacgatgccacaacttggcgcgttattaagtgctaagagtgaagcgtacattgtcttaagtacgatgggtgattctgttttctacttcttacccatgttggttgggttcactgccgctaagaaattaaaaggtgatccagttttaaccgctgtcatcggtggtgttctggtgcatccttaattagtggctttaaacgggaaatcattgcttgaaatcgggtcattaaacttcccaatggtcaactacacatattcgattttcccaatgattctcgcggcttggttgctaaattaaccaaatgggttaaaggctggttaccaggctacttacaaattatctttacaccattgattgtgattgcagtcgtttctgccattacgctttacatcacagggcctgctattatttggttatcaaatggtttagcattcgggattcaattcttattattaaagagtggttggttatctgggttattaatcggtggattctatcaagtgcttgttatcttcggattacactgggggattttaccaattattgccaacgatgttgccgcaacgggtcacagttactttaacgcgattttaagcacaacaatgattgcacaaggggccgctgttttagctgttgcgattaagacccgtaaaacagctttaaaagaattatcatttgctggtgcgatttcagcattctgtggggttacagaacctgctatttatggggtcaacttgaagttccgacgcgtcttcattgccggtttacttggttcagccgctggcggatttgtcagtgggttattccacggtaatatgttcggtttcgcggggtcgtggatcggctttgcatcattcttagatccaaaacacctagcagatttatcaaacttatggattttcatcgcgtcatcagcggttgcaacgattgtgccatttattgtaacgctcgtttggggttataacgatcaaatgacagctggtgaagcaatggctaaaccacaaaaaccaggaacagcaaaataaacgactgaaataggagagatatcgcatggcatggtggcaaaaagcaacagtttatcaaatttatccgcggagctttcaagattccaacggtgacggaatcggggatatcaacggcattattcaacggttagattatttacaaaatcttgggattgaattgatttggttgacgccaatgtatgtttcccccggtcgtgataacggttatgatattgcggactattaccacattgatcccatttttggtgatttaaccgattttgaacgactcttaaatgaagcccacaaacgtgggattaaaatcatgatggatatggtggtcaaccatacttctgatcaacaccgctggttccaagagagtctcaaaggcaaggataatccgtaccatgattattatttgtggcgtgatccagtggatggacacgaaccaaataattggttatccaagtttagtggcagtgcttgggaatatgtgccagtacttgatcaatattatcttcacctatacgaaaagagcatgccagatttgaactggcggaatgaacacttgcgggccgagatttttaaaatgatgcaattctgggcagaccttgggattgatgggctacggttagacgtaattaacaatatctcgaaggataaagacttcccgaatgatacgtttaaaacgccaagcgacgatgggcgcaatttctatacgaatggaccacatgtgcacgaatacattcatgaaatgtacgaaaaggtctttggcccgaaccaatttgtcacggttggggaactttcctcaaccccaattgatgaagcgattcgttataccaatccagcccgtgaagagttatcgatggcgtttaccttccatcatgtgaaggttgattataccggtggcaaaaaatatggacactaggcgattatcggctgtctgatctaaaacgggtgcttagtgattggcaaacggggatggctgccggtggtggttggaacgcattattctggtcaaatcatgatcagccgcgtgccgtttcgcgcttcttggatgacggtcaataccgcgatcaatccgctaaattattagcattagtcgaatttggcttacaaggcacaccgtatatttatcaaggggaagaaattgcgatgaagaacgcgaacttcaccaccgttgaccaatatcaagatgctgaatccatcaatgcttaccagcaaatgttgagcgacgggattgatgaagcgttagcgattaagattttacagcagaaattacgcgagaactgtcgaattccgatgcaatgggatcaaacggcgcatcacgggtttacgactgggacaccatggttaatgccggttgagcacgatgattactcagttgccgctaagattcatgaacccaatagtgtctttgcattctatcaagaattagtgcgaatgcgtaagcttatgccagttttaattgaaggggactaccaattatttgaaccagaggacgaagcggtttacacttatcaacgacacctagatactgaaacgattcgcgtgatggctaattttactggtcaaacacaagtccgttcaataccacacgtcaaggacgtgctcatggataattacgaacaaccgcagtttgatggtcagcaaatcactttacgaccttatgaagctatcatgatgcgggtttaagaaaagaggaagaacgatgtttaattttttgaaaaaaggaccagttggacaggtaacagcccccgttgctggcagttatttaccaattgaacaagttaccgatgaagtatttgcaagcaaggcagttggcgatggctttgccattacccctgatgaacggcaaacaacgattagcgcaccaattgatggtgttgttagttcgattttccccactaaacacgccatcatgattacaacaaaacaaaatgttgagattctgattcatatggggattgataccgttgaattgaagggcgcgccatttacgatgcacgttgaagcgggtgatcgtgtcaaagctggcgaagcgattgttgatattgactggcaacaactagcagccgcccaaaaggcaacgactatcatggtcgtcagcagtaacgccacctttgcaccagcagagccactaccaacaacagttacgactgacaccattgttggacagttcgacttagcggcagaataggtgggttaagatgcaaccaatcattattgaatctgatgatttcgggatgaccataccgatttcgcgcgcaatcattactggcttaaaaactggcgtgatttctaccactaatgcgcaagtgacatcgcctcattttgaaatgagtgcggcactcgcccagcaacatgggattacggcaatgggattgcacttggttttcgacaaagaccgcccaattagtcagccactgacgattcccagcttggtaaccccggctgggttttgtcatgcttatcaaaccttacaaactcatccaaaacagttggccattactgatgttaagcgtgagtttcaagcgcagattgaccgctttttggcgagtgggttacaactcacgcatttgacatcgcaccattttgtggcaacgttaacgcctgaaatctatgcaattgttctagaactagcgcaaacgtatcatgtccctgttcgcaatgaaacggcgcatttaagaccgacagaacaagcgtcctacctgctattaatatcggaatatgccgttttaacgactgggacgttgataacggcgcaacaaacaccgtatttaacgccacaggaaatcaaacggcaactgacacagaaaaatttggtaggtacgccggtgatcttaagccatattgggtatttatcggcagagttacggcataagagtcgtctgacgacgaatcggctagccgaattcaatgcgcttaaaacattaaagcaaaccaattattgggatcaatttagttggcaactgacggattactcagaattaggagcgaagtagcaaatgacacaatatcaacatttaacagtacttggtgatagcatcacggatcaacgtaatcattacgcacacaaatggtactaccagtggttagcagaatggctcgcgattcccacaatcaccaatctcggaatttcggggtcgacgattgcccaaccgtatgatccgatggttgaacgctggcaagccattcctgaatcaacggatttattattgatttatgcgggtgtgaatgactttggtcgtgatgtaccacttggtcaatttggtgatcagtccacagtaacattctacggcgcactacaaaaattacttgggcagattacgaaacgttacccacaagcgacggtttattttatctcgcacgttcacattgggactgacttcttttcggccgtcaatcaaggcggttatcagcaacaaaattatgaacaagcgattgcgcaagtgacggacttgtttggcgttcagcatatcagtttgtttaacgaatcagcgttgtcatttgcggatgcacaacaagcggctgagctgagtttagacagtctccatcccaatgatgctggccatgaaaaaattgcccagttcttgagaactaaaattagataagcaaaaaggcatcgagctaaaagttaatttaagctcgacgcctttttttgtggctgaatttaagttagattagaacaaatgatgacggatttctttagaagagttggccaatcccgtagtgaatggccattgtaattaaaccaattaggatgttccgaataatggagactttgactttgccatcgcccagtttagcgctgataaacgcggtaatggaaaccgcgatggtgacggcaatgattgtgccggtcatcttgtaggcttcaggcagtagaatcattgtcacaagggggaagacgccaccgaaagcggctgagaagagggatgcaaacgctgcggcccacgggttcatataatggccaagctctaggtcatatttaacattaacaattgttgctaaaggcttcttatgcattaagtccttagcgattgcgagtgccgtttcagaagtgacacctttggcttcgtaaaaagcttggacttctttaatttgatcatctttagctgtttttaagcgtgcttgttcaatggcaacagcggctttttccgtgtcactttgcgaactaactgaagcatattcacccgccgccattgaaaaagcacaggctaataaatcagcaagtccagcgataaaaatggtgaaattattggttgttgcggcggcaacactaaagagcacaccgacaacggttagaatcccgtcattagaacctagaacgccggctcgaagggtattcatcttttcttccatcgtttgatggggtttttcagttgttttgagtggggctttaagaggggtcataaaaaaatcctttctaagcgattattgtttgaataatgtcccaatagcgtaagtgactaccatggttaataatccggaaatcacattgcgcaacatggcttttgaacgattcgctttgccgagagcggctgcactgtagccggttagcgcaagggcaatcatcactgcaatgatggtggcttgcacgcgaatggtttggggtaataaggtgattgcggctagtggcaaaatagaaccgattggaaatgagatgaatgacgcaacagcggctgcgtaaggactggtaaaagcagtcgggacaaacccatatttttcacgtacgacagtcgtcaacggatcagcagtcatcatttcgtgtgtagcccgattggcaagttcaggatcaatcccagtgttgacgtatttttgccgaacaaaagccatctgagacgcataattactgtttaaattcaatttcgtattaatgattgccatttcctgtgcgtctttttgcgtgctgacagagacgtattcgcccatcgccattgagatcgttccagcaatcattccggcaattcccgaaatgaagatggcgaagctattgcttgtagcgccggcaacaccgataacaattccggcgacggataaaatcccatcattggcacccatgacgctagcccgcatcacgttaattttttgggcgagtgataatttttttgacaaggtgaagcctccaatactttttattactttataatgattataattaataacaactttcattttagtcaatttaatttgaaagtcaagtagcaacctagaccaattaaatttgaaaaatggcttgccttcgagtgtactttaaggaatatgctaaagacattaaagaaggggtgattaaaatgagtcgcattttagtattaggggcagccggacaagtggcccagttagttattgagcaactgttgaaagaaaatcaacatgagctcgtgctatatttacggcacgctgaacggctaagcgcattagcacaaaatccacatgtcacggttattgaaggtgatgtgttggatcaagagctgttggcagacagtttagctggggtcgatatcgtttacgcaaatttaggcgggcagttcgaaccattaatgcaaaacgttgtcgcgacaatgactgcagcgggcatcaaacgattaatctatatcagtggattaggcttgtatcatgaagtgccaggtgcttttggtgagtggaatgaacaagcagtcggccatgaagtcatggatgacacgcggcgggcggcgaagattgttgaacaatcttcgcttaactataccattttacgttgtgcctatatgaccaatgaagatcggatcgattacgaattaactgaaaagggaacaccgtttaaagggacgattatttcacgacggagtatcgcgcaagttgttgttgatttagttaatcatcctgaaaaaggaattggggcaagttggggcattaatcagccgaatattgatggcgatcgtcctatttattaaaaaacttgccttatagtgtactctaaggtataagctatttttgtaggagggatgtcgatggcacaagagcagtacaaaatcggcgagtttgctaaattagttggtttgtcgacttacacattacgttactatgaagaccaaggcttgattatgccgcaacgcgatgcggccggtgtccgcttttatacattagaggacgttaagtgggtcgggtttatactccatctaaaagggaccggtatgcggattacagaattaaagtaatatgttgcattgcgggctcaaggagacgcgacgattgaagcgcgcaaagctttattgcaaaaaacaaaggctcaagctgaagccgaattggctgagcgccaagcaaatttacagatcctaacgcgtaaaattgattggtatgatggtaaattggatcagagtatcgatcaagcagagagttttgaaacgtatttacaacgatttgaatcctaataaagtgaggttattagaatggtcaagaatgaacaattaaaagaaaaacaattattcccagttggagaagctaatgtggcttatcaagacttcttcgtcggtcaaagttatttatcaatgttagtgaacgaaccagacgtgaatgtcggtgtcgggaatgtcacgtttgaacctggttgtcggaacaattggcacatccatcatgctgggtaccaaattctattggtgactggtggcgaaggctggtatcaagaagaaggtaaagcagcacaacacttagtcccaggggatgtgattgttactaaagacggcatcaaacactggcatggggccactaaggatagctggtttagtcatgtcgccatcactgccggcacaccagaatggttagaagctgtttcaaatgcgctttatgacgcactttaattcagaaaggggtttttaaaatggcaaagaaacaaacagcaggccgcgatctattgggtgattttgcacctaaattcgctgaattaaacgacgatgttttattcgggcaagtttggtcgcgtgaatcagagttaccagcacatcaacggagtttaatcaccatcagtgccttgatttcaggtggtaattttgaataattaccagcgcatttaaagattgataaggaaaacggcattactgaagctgaaattgtcgaagtgattacgcatttatcattttatgtcggctggcctaaggcatggtcggcgatgaacgctgctaaagcggcttatcgaccagaataattaatcagggattaggacagataagattgtcctgatcctttttttgatggtatgatagacaaacaaatcagcatcaagaagtggaggaaaggccttgaacgagccacaaaaaaattataccaacggtgttttaatgactttatcagtgattggaatgaaatggaaaccgttgattctctgtcatcttgtggcaggacctcaaagaccggccgaacttaaaagagtcgttcagggaatttcagccaaagttttaaccaatcaattacgtgaattggaacgagatggcatcattactcgaaaagtttttaacgaagtacccccacacgtggagtatgcgatttctgcgtacggcaaatcattggtttccgtcctaggaatgatggccaagtggggcgaagatagaatcgactttttacagagcaatggtgatgatgtgcagttggattatcgagaccatgagaaatacgatatttaaagaaggcgataacatttattcaaaaagaatgttgtcgtctttttagtgatttcacaaaacttactttgaggtgcgttagttagttgaaagtgcgtaattgtttattgcgaagtacccgatatactaaccttatcaactaaaaagtgaggggaaaagaaatgaatgatattcaaaataaagtcgttgtgattaccggtgcatcaagtgggattggtaaagagacggctaccttattagcagccaaaggcgcaaaacttgttttagcggctcgacgaacaagtgcgttggcggcgttggcaacggcgttaaccgctcaatacgacactgaggttatttaccgacaaacggatgtgacgcaattagcagacatgcaagccttaatcgaattgacaatcgctaaatttggtagaattgatgtgctattcaataatgccggcttaatgcccgtctcaatgctacgcgatggtaaagtcgatgagtgggagactatgattgatattaatatcaaaggtgcgctatatggcattaaatatgccttacctttaatggaacagcaaaagagtggtcatatcattaccacggattcagttgccggtcatttcactggtgaaggcttatccgtttattcagccactaaatatgcaatgcgcgcggtgatggaagggttacgtgtagaagaagttggaatgggcattaaatcaacgttgatctctccaggacatgcgcaaaccgaattagccagccggattagtgatccgcaattacgagcagctgttctcaagagcgaaactgaaactggattaacagcaaccgatgtcgctaatgccgtaatgtacgccatcgatacaccagataatgtgggcgttaatgaagtcattctccggtcaattgatcaaagagactattaagccattggtcaaagattgaattgagtcttgacaacgaacgctaaaaataaaaaatattttcgaatggtctagttcagcgcttgcaatcgtaagttaacggcactttcagaaaggctttgaaatcagctaccacaaattgaattaaatacaagagtttaaattagaatgcttagcgtgtaccatatatagtgttgtttcgtcagatggtgcatcaatatatggaaaatggtgttgacgatctggagtgataactaaattcatataaagagggtttcagttcaatgcaagacaatcgtgcaatcaccagtgtatttaatcctaagtggtatattcaacagatgaaagggtggacaacatccagttatggtttgttgatgtttgggttaggctttattttagctgctactatttccggtggtccaataactggcgtgtcgtttttaacgatgctcgcggggatgttaggcttcacctgtactattagtattacgaatacgaaacctttaaatggtgtctttggtgtcatctctgcattaatctacattattgtggcttataatgctaaaaactataacgatatgttattacaaaccgtctacattattatgttagacatcccagtcttattaatgccagattgggcgcaaaacgttgataaaaaagtccgggggcttgctactcgtggtaaaggacttcgtaattgggcgttgacgctattgttctttgctgtatcagttgggttattatatctctgggaaagcaatatgacggacagtccacgaccattgatcgatagtatcgccgcttcagttgggtttactggcgcactgttgaccacattacggtttaaagaaagctattacttctggttcatccaaagtatcgtatcaatcacgttgtggggcattacagcaatgcagggtggttcaaattgggtcttattcttcacctatatcttgtacttatcaaacgacttagtctcattcttcgacaagaacgtcgtttggttccatcctaaagaagccattaccaaaaattaaatcaataaaaatagcgtcccaacacaccgcaatgtgttgagacgctatttttatgatggccgggttgttttatagttcaacaccgttttcttcaaataattctggtaatgtcttcagtgattgaccatcgtattctgcgaagaaatcagccacgctgtattctttgccagcaggacgagaagcatcatagcttgcgctaattgtttctgttaacttaccatctttaatggttagttctaattcttcaactggaatactccgtttgtcagtgatcttagcatcaattaagaatggtcggccagcttttgtgacttcaagggctttgtcaaaggcagcgggtaattctttagaagaacgaacggtgattgattcaatgcccattgcttgcgcaatcatggcaaaatcttgatcttcaatgaagattcctgagtaatccattggaatatcatcttgttcactcttgatgaagtttaatgcggcatttgatgtgataatgttaatgattggtaattggtatttcttttcagtgatcaagtcttgcatgaccattgaaaaggcaccatcacccgagatgttgaagacttggcgatctgggtagctcaattgaccagctaaggcaccaggaacgcctgaacccattgaagcaaagagggcagaaatcacccatttgttcttaggcgttaagttcaagtgacggaaactgttgatgatattatcaccaacatcgattgaaaagacagcatcgtcttcagcaatccggttgatttctttgtagattggttcgaattcaagcggatcagagtcgcggttcgttaaaacatcaaggtaggcttgccagtttgccatatcagcaacagcagctttgaagaatggtgttggggcaaccgtttcacttctggcgattactttttcaacaaaagcagttgcatctgaccagatcccgaagtctaagaaatggtgacggccaaattgtgcttcatcgttatcgatttggataaacttgaagtcatgtgtccgataaattaagttggcaaatgggaagtcagcaccgatggcaatcacaagatcactaacggccatgatttcatcagccgctttagaagcagcccggttagccatgcctaagttaccttcataactatcaggcactaaccctttagcaagcccagtcatgacgattggaatttgaagtttctttgataattcaacgagcttatcgccgccgtctttaatcccacgaccaacgtgaattacagggcgtttagcgtctttaaccattgctaagaattgatcaacttcttcgtctgttgcgactggaccagccacttttttacgatctgaaggtgagcttgagctatatggtgtatctggaatttcaacgtagccgaagtcatttggaataacaaccactgcgacgccattgtgtttgtaagcttcacggattgctttatcaacaacgtatggcaagctttcaggtgtcataacgaggcggttataaacagcaacgtcagagaacattgggttttcagcgaattcttggaagtagttgtagttcatgttcttgcttggtacttgaccaatcaaggctaaaactggtgcatgatcttcttttgcatcatataaaccagttaaaaggttagttgcaccagggccagctgaaccaaaagcaaccccgattttaccagttaatttagcgtcagcagctgcggcaagggccccaacttgttcgtgacgaatttgaatatattttaaacgatccttttcaatattaagagcattcattgttgagttaaatgagccaccagggtaaccaaagatatgatcaacgccccaagattcgataactctaagcatagcaacactagctggaatagttttttgagtagtaactgtcattatacagatctcccttaaatcaataattaggttgcacacaaccttatgggaataatttagcatacttagaaaacgattacaagtgttaaacgtaggttaatcatatccttaattaattaaccgctgataaattggtgcttgataagattgaatggatttaagcagcaaaaaccgcgctatccgaaaatggttagcgcggtttgattagtttaaatagtctagtaaagtatcgacagttaatgcttgcttttcagtcgcgttcaagtcggcaatcagtttaccggcttttaacaccaagagtcgattgccatattgcaacgcatcctctaaatcatgcgtaatcattaggcaggtgagttggttatcgcgaattgtttgattggtaaaagtcatcaatgcttggctggaaactgcatctaaagcagatgtgtgttcatctaataacagcaattcaggtttttgaatcgtcgccatcaagaagtttaacgtttgtcgttggccacccgacaagttactaaccgggcgattgagttgttgatccaagtgattcgggagtgtcttggcgagcgctttgatttgtgggagttgttgcttgagacgccggggaaataagcggcggcgttggccacggcgcatcgccaacaaaatattttcggcaacggtcatatcagctgcggtgcccaacttaggatcttggtagacacgactaatgagccgtgtgcgttgttgggcggattgcttcgtaatgtcgtggtcgttgaatagtagttgcccacttgtgggggttaaatcacccgcaatggtattaaaaaaagtcgatttacccgcaccgtttgcgccaaggaggacgacaaattcaccaggattaatcgtgagatttaaatcatttaagagttgtttaggttcattattatcagtaacttcaaaattgaggtggtttaaagtcatacgcggggtcatttggtagtcagtcctttcttttgttgtggtgcgatgatgaagatggccaaaatgacggccgagaagagtttgaaatcattggcgttaaagccgagttgtaagacaaggagtaagatgaggcggtagacgacgcttcctaggataatgctaattagtttggcgatgaaatgcttgccgacaaggagccgttcaccaatgatgatcgcggataacccaatgaccatcacaccgatgcccatgttgacatcagcaaagccgttatattgtgcaacgagcccacctgcaagggcaatcaagccgtttgacagcacgatcccaatcgttttcgtccgctttacggcaatcccttgtgagagggccatcgtgggattatcaccagctgcaatcagggattgaccgaattcggtgtagagtaagccagccagtaataatagggcgatcagcatgatgactaggttaatgactaagagccgttgatcgagcgttaattgatggaatagcggcagttgatataggttgtgttgatcaccaattgccatgttggcttggcctaaaatccgcaagttgatggaatacaaaccggttagcgttaaaatcccggctaacaaactctggacatggaagtagttgtataaaattgccgtcacgagtccggctaaacagccaccgatgaatgcgactaatagggaaaaggcaatgttatgttgttgcaacattaaagcgccgagggctgcgcctaacgggaaactgccttcaacggtcatgtcagggaattttaagattcgaaaggtgatgaaaacgcctaggcttagtaggctccataataatccttggtcaatggttgagataataagattcatttgagaacagctcctttttgattagcgatttgcattaaactctgcggaattgtgatgtggagggcttttgcttttttgaggtttaagactaaatgtcctttgcgtaaataccgaattggagtggttgcgggttttgaacgaccacttaaaacagcggcggtcatcttaccggtttcaacgcctaagtcgtattggcttaggccgacggttgcgagcccgccatctttaaccatcgtttcagcggatggaaagactggcgttttggttttgtcggtcacatggacgagggtgcccattacactagcaatcgtattatcggtgggaacgtaaattgcatcgacttttgggactagattctggctgacttgttccagatcgttgactgaactaagactggcctcaacaacggtcagccctttttgttcagcaagttgtttgaataagtgcatttgactggtggcagagttatcactgcttgaatagagaatgccgacggttttcagttgcggcatgatggtttgcattaatgccaattgcttttgaatcggggcttgatcggatacgccggtgatattggcaccaggatgggcgttgttcttaacgagattggcactcgccggatcagtcacggcgcctaagataatcggtaattgcttagtggcattggctaagctttgtgcggcaggggtggcaatgccgaccgttactttggctttttcagtgacgaattgattgctcatcagacgtaaattactttgatcgttctgcgcattttgaaaatcaattttgatattacggttgttatgatagccttcgcttgctagaccagcgacaatcccgcgatgaatttcatcaagtgcgggatgagataagggttgtaaaatcccgacaattggcaatttaggttggttggcttctttgatttttttgataccaagtagggtgagcaaactcccaaaaattagaatgaggggtaaaaaacgtttgagtttagacatggcgaaagctcctttaacgtgctttttgaaactgactcttgtgcttaactacatttaccaaaccggtgattacatcaccaatttggtaaattaggttaatgctcagagtcaaaccgtttcaaacgcacttctattttttaacgtgcttttcaaaccgtattcctgtgcctagctacgtcgcacaaacgaccgactgcgtcgttcattcgcaccactaggctagtgttcgaaatatacccggtttgaacgcactcattattatcaaacaaaaaagtcccccacatgacagtcatgtaggggacagaaaaagcctacatggatttcctcgagttaaaatccatgtaggcttaaaattcaatcgattactgatgaatggccgcatggatacaatcaaaagactgtatccataacggcatacaatctcacttagcggctttgccaacgaatattcaattgtactaagtgagtgtttgtcattttcagtaacctccgttttatttgatgatctgaagtatagcgggatgggtgaaacaagtcaaggactttgagtaattttcttttgaaaataaaggtgggtctagtctgaaaaagcggtcgatctggcttgctttttagcgctaaaaaagctaaagttattaacgtatacttgtgtttaaaaacaggaggaataagacaaatatggcacatatttcatttgatgcatcccgtttggacaaatttgtccaatcaaacgaacttgcagaaatgcaagcaatggttaatgctgcagactcacaattacgtgaaggcactggtgcaggcaacgacttccgtggtttcttagatttaccagtgaactacgataaggacgaattcgcccgcattaagaaagctgctgctaaaattaagagcgattcagaaattttcatcgcaattggtatcggtggctcatacctcggtgccaaagctgcaattgatttcttgaataacacgttctacaacatgttaccagcagaacaacgtgacttcccacaagtattattcgccgggaactcaatcagttcaagttacttaaacgacttagttaacttgatcggcgatcgcgatttctcaatcaacgttatctcaaaatcaggaacaacaactgaaccttcaattgctttccgtgttttgaaagacaagttgatcaagaaatatggtaaagaagaagctaagagccggatctacgcaacaactgaccgtgctaaaggcgctttgaagacagaatcagatgcagaaggctacgaagaattcgttgtgcctgatgacatcggtggccgtttctcagtattaacagccgttggtttattaccaatcgccgttgctggtggggatatcgaccaattgatgaaaggtgcagctgatgcccgcactgaatacacagatacagacgttatgaaaaacgatgcatacaaatatgctgctttacgtaacattctttatcgcaaaggttacacaaccgaattattagaaaactacgaaccaacattgcaatatttctcagaatggtggaagcaattgatgggcgaatctgaaggtaaagaccaaaaagggatttatccttcaagtgctaacttctcaactgacttgcattcattaggtcaatacatccaagaaggtcgtcgtaacttgatggaaacagttgtcaacgttgtgaaccctaacagcgacattgatattccaactgatgaaaagaacttggacggtttaggctacttagaaggccacacaatggacttcgttaacaagaaagcttaccaaggtgttgtcttagcacatactgatggcggcgtccctgttatgtcagttaacatcccagatcaaacagcctacacattaggctacatgatctacttcttcgaaatggctgtctcaatctcaggttacttgaatggtatcaacccattcaaccaaccaggtgttgaagcttacaagaagaacatgtttgctttattaggcaaacccggctttgaagaattaggcaaagaattaaacgaacgcctataattcaacgtttataaagataaaattcgacttttattaaagcatttagtctattgattttatgaaatggtgcagtatttggtgcattgttctaaaataaatggattaaatgctttttgtttaatacggataaagaataaaatatataaattgcttatttttagtaagcgaagtataatgaccttatcaaagatgaccaattcatcaataatattaaaagtaaaaatggagatgatggcaatgttagtcattcaatatgtcaacggtcaaacgaacgctgaaaaggtttatcaaaaagcggctgaatttgtcgcaaatcaacaactggaagtacccgatttcgaagattacgtcgcaattaagcgggggacgttggatgggcagccattaacgttggcggatgcgaccatgcgcggcttatataattatttaaatcaataaagttaatctgaaagaaaaacgtcgctcaagagagcggcgttttgagttataaaataaaaaagaccagccaacggcagtcttttaattaacgtgtagtaatcataatgagatttgagctgtgataagtttcgctaggactattttcgaggataaaagccggcgtgtccttaacaaagtgcgagatttttgcgacgatatctgcagcagcacagtctttgatggtcaacttatggcgtgaaccattcgtagaaccaaaggcagataatgtgtcattttgttggagcgcaatttttgagccctcgttaaagaataacttaaccataatttaaaaccacctttcgtaagtaaatcatataatattgataagaaaatcacaaggataattaacaattcaatacccttaatattatcaagtgcaattacttttcggaaaattattcgttaaaagaaactactttttctaatattcaaacgccatttcattaaccgattcttccaagccttcgacaacttcattttgttcaatgaacgttaaccaagtttgatattctttggcgtgttcaccacgaatgttgaatgccattttcacttgaatactagcgataaattcggcgaccattttatcaacggcccgatcgaccttattctcgttccaacgtttggcaggttggcgtttttggttcttttcattttggtagtctaaacctttggctcgaaatgtatcgatgacgcgggaatgttcttcaagataggcctgtagttcggcattgttcatagtcgtgctcctttaaactctaatagttagcaagtaaagattttagttcagcttgggcagcggtgtcttcagaaacggcaaagacaagtggttctgagtaagcttgtttgccgtcatcttttagttcgctgaaaccatcattagttgatgtgaggtgaccattacctaatttaagttcatacacgacgccgttatcaccaagtaggtatttgctaaccggtttgtccattgccatgttaaggctgtaattatccgcgaatgatccacgatctaaattgtctttaccgactgttccatccaaagcggtataaaagacacagccaccaattgcatgaacagggtaggcattaaaccctgggcttgctgtcccaggttgaactaaaatgcggccatcaggtgaattggcaaaccaatcgccaaatccggcagcaccgtggtcaaaataccaatcactgacggccatgtttccgattgtggcgcgttcagccgcccacgctagaaaagcttgattaacagaagtttgttggtcggcagtgagcgcttttttggcacttgttgactgattagattgttgttttgcttgttcaatagattctgaagctgcaacgatactttctgattgttgtttaatagaagcttctttcgagctagcgattgatcgacgctgattgctttcttttgcttctgatgaggcgcgatagcgtgctaaactttcggagtgggttgcggcttgttgatcaggtttaattgaccgacaactagctaatgaaagactacttaaagtaatgaaagtgactgcaatggttcgtttatgcatgttaaatcccccaagttaatgattaataagtcattgcacggtgtccctgtggtgcagcaattttccagaatttatcaaatgagattttttttcgtttgccggtatatggatcgttaaaggtaaatgaattttgatcatagccaattaataagacggaatgcgctggttgtttatggtagttaatccaagcgacaattggtttcttttgttttaaagtagctttgagcgtgctaatcggttcgtccgataaatcggtgaaactgccgagatattgatagaagaatcctgtccaagcaggaggatacatagtgtagccagtatcatcgtatggattcccccaaaagccgacctccatatcgccatcattgacataagggatactatcggccacttctgttttgctcatgtcaacgctacggtaatctaacagcatggcaacagccgtaatttcacaaccggttggtaattcaggaaattgtgaaatgggtgtgatgtcgagcatcgtttttttgggtgtttttttcttaacaattttttggggtgtggttttatggaagaaccaaatcccggcctcacttctggtcggtcctgtgaaaagccataaaaaaagggtggtaatcagtattaaaacgactgccacgcgcttgtaaaagtgttttggcatttgataatcctcattctaaatttagtcgacgaaataaatatttaaaatagtatagcatttaaaggggcgtaatagctatagccactcacggatttcaactgtgatggaatcgccaatttcttttttgagttgtgcacggatgtctttgcggaccccaagaatgtaacaaatgttgccatctggctttttaagtcccatattgacaatactgccatcatagggaatttgttggtcgaaaagggcgtggacttttacacgacccttcccgaagattgcgcggatatcgccaggaaattagacatatgcaccgcctttaccaatcgtcgcggcttggattgaggctgtaaaagtataagtttgctcggtcatcggtcagaactcctttaaaaaaacgtcattaaaaaaagtgaccacggcaaattcagtcgtcacttttagtgattattggaaaaagcgcattaattggcgattaaaacttgcccaccaagtgtttgggtgcaaaagggttgcaacgattgcttggcgatgttgtaagaaccagcgcttaatattttgatcagacaatttagtgatatcaaacggcatttcgaaccactcctaaactacctttattatatattagaaatgggacacgtcaaaaacaaagcattaaacttaaccaatctttaaaccggcttaaggcttaattaataagacgttggtgttagaatgaacactgatgaattgtgcaacagaaccgattaagagccgctcaaaggcgcccttaccactgacaccgagaactgttaaatcaatatgagcttcttctgggatggtaaaggctaattcacgacgtggcgaactcactttaaggatggctcgtacgttagggacaccgtgttctttagcgaattgcaccttttgatcaagatacgattgaacgaaatgtttttcagatgtcgttgtttcagcagggtaagtcatgcgtgcatttgtgtaaagggtatctggaataatttgagccacaactaattcggcattattgcgtttagcaatttcaatcgcctcactgaaagcgcgttctgataactcagaaccatctaaaccgataagaatatgctgataattaaacataaaaaagacctcctttatttaccttcaatatagcattttaaacgaagaaacgccgtaaataagcactttaaattcgataggggatagctggttgagtgactataacaatttggcaccactaatttgtgccgaccgtatcgtttactttgattgaactgcgccctataataagaatgtgaataatttctcccgaaattttttaaccactatataaaaaaagagccgtcgaatcgtagattcggcggctttctttttataaatgattaattgaaagttgtgtgacttgttgcttgttgttattggtcgtcataacggtatagcgaacttcgcgatccgtcagttgcattaatgacccaggtttcttaagtgagcggtcgaccaattcagtaatctgggttggtttggttccgatacttgttgaaaaggcgaggacgtagtttttaaacgttagattcttacctgcgttgagagctttaattgagatccccagtactttgctatcactgacgttcatggcaatcacgttgttgctgtcaacttgatcagtgcgaatgccttcaagtggattcgcttcgaaaacgcccagtcctttttgttgggcaatcggattataaatctgaataaagttcggccattgcacaatttcttttgcgacagggccttcaacataagttggattacgcatttcttcattatcagcaagtgtaatccggtactgcttagctttgtaagggacttcgaatgcgaaagcatcatcggttgttttagtcgtatgaatggtatcaccgatttgccaataaacctttttatgtttagtcttaccagtgatttgcgcattgaagccactgtttgtttcgtggagctttgctttaaccggattcccacaagcggttaaaataaaagttagacctaaaatcatgaataataatttgacgtgacgcatttctcacactcccaatcgataatagggttaactatgaatcaaaaaataaaagactccccagtcttctacttcattgtaacccatttcatctttttttcaaaatcaccatattcactatttaatactactgtaagagaatttcaacttctgaattgcgcggacatgtcgttgattattagccttgtaaacatcatcagtgtattcttggaaagttccgtttggacgggttgcaacagagacgaacgacccagtcttggataagacatctttggcataaacgagttcttggcgattgttatcagtcgcgtagtctttcattttttggtagtcaccttgaacactgacatagtaatcatcagcgtcatcgagtttaccttgtgctagtaaacgccgaccttcagcagcaacagcactatcatgatcgttataatcaacatttgcgacgttaactgttccgttttctgttaactcgccccaaactttattatacttttgagcgatgaattcagtggcaacagtcgattttttaatatgtttgatgaattggcgttcagctttatcgaattttttatctttcttttcaatcttcgctagttcttcgcggtgttctttctgagccatgtagaagttatagccaacaggagatgccgcgataatcaaaccaatcaagcaaataattagaggggctttaagccgttttttaaaaattaagaaaaataggagcaggataatgccaaatgcaaagacagcaaggcctgcataaagaacgatggcgagtattaagttcatatagtaacctccaaaacagtaatcggataatcagggttaatacggttaatcaatgaatgttatcccattttatgagatattagcaagtcaaatttacagaaaggtctgtaaaaatatgaatcttctcatgaaagggatttaaacagaaaagtcaattgtttttccttgcattttcccgtattataataggatacgtaaaaatatgaatcatttataggaggaatagtagtggacgcttctttgacaacccgtttggctgccgaatttattggaactgcaattatgattatttttggtaacggggcagtagccaacgttgaattaaaaggaacaaaaggttttagtagtgattggtttttaatcgcttttggatatggttgtggggttatgattcctgccgttatgtttgggagcatttccggtaaccatcttaatccagctgttacattaagttttgcagtgatgggcttattcccttgggaaaatgttttaccatacatcattgttcaattcttgggtgcaatggttggtcaattattattggttgctgcttacaaaccatattatgatcgcacaacaaaccaagaaggcatcttgggctcattcgtaacaatcgatgctgctcatagccggatgaatggttttgtaaatgaatttttaggcacattgatcttagttttcggtgctttagcaattggtgcaggtaagtttggcgctgccggccatattgttgttggtttattggtgatgacattagttgcttcattaggtggcccaacaggaccagctttaaatcctgctcgtgatttaggcccacgtttggtgcatatgttcacaccgcttaagaacaaaggcgactcacaatggagttacgcttgggtgccagttgttgcaccaattatcggtgccatctgtggcgcaggtattttccaaatgatttttgcataacaaaccgcttctaaaaatagtccgtcaggactattttttttgctttcaaagcaaaaaatacccggcataaaccttaattgggaaaggcctataccgagtatcttctgaatattgaaatgatcttacttgggggagtattaatcatttctgttattgaatatatcataaaataacgggagtttacaacccttttacgtgtaaaaccctaaaaaaataaattattttataataatgcatattattaaaatgttttttgaataaatattcaaactgatttaattacctgactcgttagcaacaatgttttatctcgctgacaacatagactactatatcagctctacagcctttcgtcaactattaatctcaactgttatttatgaactttcataatctaaacagtcgatagtatccgcaatttatgcaaataaatgaactattaaacgaacaactcgcgcaaacaacataatataccgaaagttgatgcttattcacccacaaaatacactaaaaaaactttttataatcccaatttttttcaataaaaaaagcccgcaagcaaatcgtctgcttgcgggctttagtttaatcttaatcgttattattgttgtctggacgcattgttgggaataataagacatcccgaattgatgcagcatctgtcagtaacatgactagtcgatcaatcccaattccaagtccgccagtcggtggcattccgtattccaatgcttcgatgtaatcttcatcgattccttcggcttcatcgttcccattttcacgttctttagcttgtgcttcaaaacgttcacgttgatcgatagggtcgtttaattcagtaaaggcatttgcatattcgttaccgtacataaataattcccaacggtctgtaaaacgatcatcttcagcattcttcttagccaatggtgagatttcaactggatgaccatagatgaaggttggttgtaccaatgtatcttccacgaattcttcaaagaacgcattaatgatgtgccccacttgccagtatgattcatacttcacgtggtgttgatcagctaattcacgcgctgcttcaaccgtcattggttgccagaaatcgacacccgtcttttccttaattgcatcgaccatgtgaacccgtccaaaatcaccatcaagatcaatcgcttgtccttgatatgaaatctgaccagttcctaaaaccttgtgcgctgcaaatcggatgataccttctgtttcatccataacgtctttataatcaaagtatgcagcatatgtttctagcattgtaaattcaggattgtgtttcgtatcaatcccttcattccggaatacgcggccaatttcatagacacgttccatcccaccaacgattaatcgtttcaaatgaagttcaagcgcaatccgcaagtacaagttgatgtctagcgcattgtgatgggtaataaatggtcgtgctgatgcaccaccagcttgaccatgcaagacaggtgtttcaacttcagtaaagccattgttatctaaatattcacggacagcagaaataatcttgctgcgtttcgtgaaccgatccaagctctctggatttgcgattaaatctaagtaacgttgacgatagatttgttccacgttggttaaaccatggaacttatctggcaatggtcgtaatgcttttgataggaaagtcaggtgcgttgctttaacagttaactcacccatgtcagtcttcataatttgcccagtaatccctaaatgatcacctaagtcagcctttttgaaaattaaatagttttcttcgccaacttcatctttacgcacgtaaatttggattttacctgaacggtcacggatgtcagcaaagccaactttccctttcccccgtttagacatcatccgtcctgcaattgtgacttctagattcttagcatctaaatcgtctttttcaattgcttcgaattcactgtgtaattccgcagccatatgtgttctatcaaaacgactaccaaaaggatcaattccttcgtcttttaacaattgtaacttttcacgccggacctttagttggtcgttcatttctctttgattatctttttgtcccaactgacaattcctccatacattcaattatctactaatgttgattttaacacgaaaacaccaacataaggaacctaatttgccattctcgcttcggtttcttctacaaagtggtctaaaatatcgccaacggcttgttccgtttccacttcgttaaccgccgctttggtcttagccgcacgaggaatccctttcaagtaataggcagcttgttgtctgaattcacgacaagccacattttcacctttaagttcgactaaacggtgtaattgtaacttggccgttgcaattttttcccatggggttggttcagcaatcaattcacctgttcgtaagtaggtttccacttggcttaaaatccatggattaccgagcgcagcccggccaatcatgacagcatcagcacccacttcgtctagcatacgtttagcatcttgtggtgtccggacatcaccgttacccataaatggaatcgttaattcagatttaacctgttttaaaatgtcccagtctgcttgcccggtgtacatttgtttccgtgtccgaccgtgcattgcaagtgctgaagcaccagcacgttcggcagcaagtgcattttcaacagcgaaaatatgatcttcatcccagcctgtccgcatcttaaccgttactggcttcttcacggcgtctgtcacgtatgagaccatttcataaaccttgtttggatctaataaccaacgcgcgccagcatctgtcttaacaactttattcactggacaacccatgttgatatcaataatatcagcttgtgtatgttgatccacaaatttagcggcttccactaaggtgtcttttgaaccaccaaaaatttggatgctaactggatgttcattcggatcaacaaacatcatccccattgtcttttgattattgtgcataattccgcgatcactgatcatttcacagaccactaaacctgcgccaaattcctttgcagttacgcgaaatgctgcgtttgtaataccagccattggtgcgacgactacttgatttggaatcgtcacgtctcctatttgccatgtcataatgccaacccattcccttcgtgtcttccgacaatatccaaattatcatagcaaaaaaatagtattcaggcaaaaatttgcgactattctattgcgcggctaaaattgcctttagttctgcttctgtaaattgatattgcttgccacagaaacgacaaaccgcttcagcaccgtggtcttcatcgattaattgttgtaaatccgctggcgcaacagaactgagtgcctttgcaaaccgatcctttgaacaatcacattcgtatttaacaggtattttttctaacgtcttcattgggagttcgcccacaatttcagtgataatttcctctgggctcatcccttgttggagtaattcagacaccagcggcatttctttcagccgcgcttctaagatatcgattaaccggtcatccgcccctgggagaatttgaatcatgaagcccccagcgacaccaattgagttatcttcattaacgaagactgaaacgccaactgcagatggtgtttgttctgatttagcaaggtagtaagtaaagtcttcacctaattctcctgataccaatggtacttgaccggtaaacggttcttttaagccaagatctttcgtgacactcaacgtaccagttgtcccaacgccacctttaacgtcaattttatttttgtcgttcaatggtaggttaacgtgtggattcgtcacataccctttaactgtgccttgcgcattcccatcgacaacaatcttcccgactgggccgtcaccttcaactctgactgtcatcttcgtatcaccttttaagccagcagcactcaataaaagggtgccgacaatcgtccgcccaaacgctgctgatgaagttgaccatgtgtcatgtttttcttgcgcatccgttacaacatcagttgcgttcactgcataagcacgaagttggccatcttctgaaatttgtttaattaaataatctgtcatctaaataacctcttttatggattgatgcaaaaaggtcgaccactaatcgtgtcgacctttttggtgtaacaatttatgcttcatcgtctggatgttgattatcctcagctggtgtcgattgatcatcttcatcaggtgtgattgtcacatcctttttatcagtttctttttctgaatcttcttttgcggcttcttttgcttcaagcgccttcttagcttcttcaaaagtagctgctttttcgcttgggaattcttcagcgttcttttctggcatcttaccatcattgaacaagctcaagatttctttttcgtttaatgtttcgtacttcaagagcatttccgcaattaacttatgttgttcacggtgcgcttcaataatttcgtgtgcttgttgatgtgcttcgtcaataatccgacgaatttcactatcaattgcagccgcagttgtttcggagaaggctgggccttgaccgtaagctgccccaacgaatggttgaccttctttttcaagggccactgtcccgagcttatcagtcatcccatattgagtaaccatcccgcgggcaatatccgttgcttgttcgaaatcgttagaagcaccagttgattgagagttgaaaataatttcttcagctgtccgaccaccaagtaacccaacaatttgttctgttaattctttcttactcattaagaactgatcattcttcggtaacatgatggcatatccgccagcacggccacgagggacaattgttaccttccgaacaacacgagaatcactaagaactaaaccaatgatcgcatgaccagcttcgtggtaagccacggtttcacgttctttaggattaatcacgcgatcccgcttagcaggacccgcaatcacacgatcttcagcttcatcaacatcagaagcatcgatatcggtcttgctacgacgagcggctactagagcagcttcgttcaataagttttcaagatcagcaccaacgaaccctggggtttgttgcgcaatttctttcaaatcaacatcatcggctaaaggtttgttcttagcatggactttcaagatggcttcacggcccttaacatctggacgaccaactaggatcttccggtcaaaacgacctggacgtaaaagcgctggatctaagacatctgaacggttagtagcagcgatgacgatgacgccttcgttccccgtaaacccatccatttcaactaacatttggttcaatgtttgttcacgttcatcgtgcccaccgcccatgccggcaccacgttggcgaccaacagcatcaatttcatcaataaagataattgatggggctgcttttttggcttgttcgaataaatcacggacacggcttgcaccgacaccgacaaacatttcaacgaagtcagaaccagagattgagaagaatggcacacctgcttctccggcaacggctttagctaataaggttttaccagtacctggaggtccttctaaaagaacacccgctggaattctagcccctaatgcagcaaacttccgtggatcttttaagaattcaacaacttcgactaattcttgtttttcttcttccgcaccagcgacatcagagaaacgtactttattagctttcttgtcggctttttgagctttggacttaccaaagttcatcatccgaccgccttgaccgccaccttgacccgcttggcccatcatcatgtagaataaaccaaacatgatgatcaatggcaatacaagacttaaaatacttacccaccaaccagattgtggttcttgaagggtttcaaccttggttgctgatttgtcagctaacttggtcattgccccaacttgtgaatcactttgtaataaggttgttgtgaagtgtttaactgatcttgcttttgttttttgtcctaaaagattctttttaggctgttctgttttttgtgctttacgatattctccagaaattttataaataccattcgttggttgaattgagaatgacttgaccttattggtcttcaattcacttaaaaatgtacttgattgaacttccttagactctgatccagcgttaccgttcatgaagaacgagaacacaccgactaaagccactaagataataatgtaaaacagactattactaaacagtccattctttttgttgttcatacgtgacctcctgaagcttctcatcatttgtgacacagtgtccttttgacactgttaaactataacatatctgacttttattgaccatttatttacccgaataaatttcaggtttcaaaacgccaattgttcccatatttctgtatcgttcggcatagtccaatccgtaccccacaacgaattcatttgggacttccatcccaacataatccgaatgaactggcacaattcgacggcttggtttgtccattaacgtgcagactttaattgagtttgcttgacgtgttttaagaattgccattaagtaattcaacgtgcgcccagtatctacaatatcttcgataatgataatgtcgcggcctttaacactcgtatctaaatctttgatgattttaacttcacctgacgagatggtctcagcaccataacttgacacatccataaagtcgatttcaacatggaggtcaatttcgcgaatcaaatctgtcatgaagacgatcgcaccctttaaaataccaattaataacgggtttttaccttgataatccgctgtaatttgttttcctaagcgctgattaaccttttgaatgtcttctcttgaatataatacgcgttcaatatctttttctaacattgtgccagcctccgtaatttgcttaatcatctaaataacatagtatgtaccgtattttaccagtttgttcgcgattaaacaacgccgaaatccgtaaatccggccggccaagcaattgatttggggtccaaaccgcccatgcattttggcgctttgcctgtggggttttagtatcaatccataaccgttgaatggttttgtggtgtgccttatcaagcattattcgatctgttgcttgtagcgccctgagttgcagtggccattcctctggtgctaaccaaacgacctgttgccgttgaacttgattaggtagatggtcgatatcgaaaacaccaacttgttcgccattttttaaccgcagccattcattaatcgctaatgttcgtgttttgaccaaagaatccactatttggtggacaccaatccgaaaacaccgatactgcttttcaaaaatgatgccattgttcaatgccacttggccttgcggtttctgcgggttcgccaacaattgttgcacttgcattaactgggctgcctttaacgccggtaaagtcttgaaatatcgttgccacaccaattgccagagcgccctttgttgtgtctggttcaagccatcgagttggtctaaacgcccttcaattgccgtcggctgttttttgattgccaacaatggcagtaacgccgcggttagatcatcttggtgtgccaccatttgggtcagactttgactgaaccgattggcattttgaatcaagtgtggattttctcgttttaaaagtggcaccaccgcatgtcgcatccgattacggagaacagtttgttcctgattggtttgatcttcgtaatacctcaaaccaatctgatcagcgtaatcacgcagttgttgcttactaaaaggtaatagcgggcgaattaacgtccccgttttaaacggtctgacttgccgaatcccccgcatttcatgcaattcaccgctacgaactaatttcatgagcaaggtttctagttgatcgtcgccgtgatgcgcggtcaccaagtaatgcgccgattcggttcgcatgacttgatcaaaaaaagcatagcgaaattgacgtgccgccgcttcaacccctgtttcaggatgactcgcttttggccaatgttgaatgcgtaacgggatggcatgcaatcggcaaaactgggttaaatatttttcttcagccgtactttgcgcacgcaattcatgattaacgtgagccacaacgacttggggtcgttgtttttggggcagatgagtcaataaccacaataaaaccattgaatcgactcccgttgacgttgccaccacaaccttgtcgccggcttgccagaactgctctttttgaagatgtgtttgaaatgcttgttctaacataccgattcctctccaacacagacttgaaatgaaataaaggttgccccgaaagtctatcactaaactttcaagccaacctttatcaatttgttctattaactgcgacggccgccacggccaccacgtttaccttctgtattccgtttaatcgttgataagcgatcttcactatcttttaagaaccctgataataaatcatcaaagccttcttttttaggtgcgcttgaatgctctggtttgcgatatccaccgcgattattatttggacgactttgagggcgcggatgttcttgcactttaggttgatcaacggctttgcggattgataaaccaatcttaccgttttgatctgacataaccttcaccgtgacttcatcaccaacggttaaaacatcatgaatatctttgatataactatcggacacttcactaatatgtaccaacccggttttgccttcacctaaatctacaaaagcaccaaaattcgtaatgcccgttactttaccagcaacttttgaaccaacttcaactgccatataaaactacgtcctcctaaatggtcgtttgaactcgtcaaacttttaatcacttaagcgtgatatttaataaaataagtatagcacgctttgcccttgaaacaaggtcgtattctgaattatttttgttgctaatttaaattaggcgccttgtcctggggcaaactgaagatggtttcaccgtctttagaatagtaatacttgtaccgaatgtatttggccaagtaatcattatcatgcagctgttgcacttgaatctttaaatcagattcagttgctttagctttttttaatgtcttttctttagctgccgttgtttctctaatctcggccaatgaatgatgggtttggaaaatctgcacaccacaaattaagacgactaatactgcaacaatccccaagccacataagcggcgtttatgaacacgcttaacatgggctgccttgtcttgcacgattttctgggctgcttgttgctgggtaaatgcattctcgattttcgcaatttttcgactcacttagaagccccccatctcggaattaagttcattatagcaatttcacaaaaaggtcgtcaactaagatcccagattcttaatgacttttattaagatgctcaacaaagtcacaaaaaaaagcaccggcccatattaattcggccagcgctttttccttaatcaaagttttcagcttgtcttgtttccaaaatttcatacatttcagctgcatcgcttttcttcgtagtttcgatgatctgtgtaatgcgtacgaccatcgttttattaccaaatccgatctccagtttatcacccacgatgacattgcttgaagattttgcagggcgatcattaatcatgattcgacccttgtctgcaatttctttcgcaactgaacgtcgtttaatgattcgtgatactttcaaaaatttatctaagcgcattattttgtcctaccttttatttttttcgaaaggcgcaatagttgccggccacctggcatcgtcagccattctcgaatcgagaataattgccaccgtaatgctaatccgccaaataggagcacaccaacgagtacgccaaggcccgtccctaaaatcgcatgtcctctggaactaagtgattgtggtgcaaactgtagcgcaatcttaacacccagccacatcactgcacaaatcgcaagtaacttaccggtaaagcgttgcaaaccaagcgcttgccgtacaatcactggtgattgccgtaaaattaaggctaacacaacaccgaggctgataacagtcccgacactcgcgccaacaatttgatagtgttgcacaagccattgattgattgctactttaacgattaacccaacaattaaggctgccgttgttttatggaactgatcaagactttggagcaccgagttgcaagcattgatcagcgcgatgattgcgatactcaacatataccaaaccaatgcctgattaccatcagcatccccgaataagaaataattaatctgcggcatcaaaaccattaggccggtggttgctgctgccgataaacctaaactgatatgaatcagcgcttcagcaacttgttgaaattgatattgttgccgccgttgccgcgcttgtgacagactcggaatcaacgttgatgagaaggcaagtgacacgactaatcccagctggacaagtggttgcccacggtcaaaaatccccttcatattcttagcaagttcttccgataatccactgaggaccaacccttttttaactgtgaaggaatcaaccagctgtaataacacaattaatgaagcaaagaggcaaattgacccgccttcaatcgctaagcgttttgccaattgttgatacgccttaaaatcgatgccaccacggtgtggcgccttgagttgaaaggcggtttctgctggccgtaataaaatataggttgcaaccaagccgccaaagaaggcgcctgatatcgcccatgtgcccatttcatacactgaccagtgcagtttcaaagatagccacgctgccgccaagatgaccacgacccgcacgagttgctcagcaacttgtgaaaccgccgtcggtaccatattgaaaattccttggaagtacccccgcgtcaccgctagaaacggcatcaataaaaacataaacgataccatttcaatcagcggtgttaatgctggatccgccatcgcccccgcaattttcggcgcttgatactgtaaataaatgaagattgcagcaccaaagatgcctaacagtgcaaatgagcgtcttaacagctgcgtttgttcctccggattgacttgttcagcaaccagtttcgaaatataaactggaaagccactaagtgcaaacgtcatgccaatgccatagattggatagacttgttgatacacgtaaaagccggtgttaccgaccatattttgaaatggaatccgataaacggcacttaataccttcgcgataaacgacgcaattgataaaatgaccgcgcctttcatcagatgttgcatctgtttattttgcatgcctggcctccacttagcgtgcctaatccgttggttgttccgtgtgcttttgttctatcttcaagagacttgtaacaaaagttgccacttcactcaaccaatctgccggttgcatcttcggctggattacgagtttcacgcttaattgttcttgttcaaacccgaccgttgctttcaagcgggttgtcgataacgcttcaaaaatttgttcacctgaaacaaggcgactgcccttcgccgataaggtgacttgaatgatttctttcgtttgtttgatggtttcgattaacgcgtcatctgcattcatcttcaactgaccaatcgctaataaattagcgacttgatctggataatcaccgaaccggtcaattaaatcggcctgaatttcatcaaaggccgcttctgaatccatctggcgaatccgtttataaatttcaattttttggcgttgatcattaatatacgcgtctggtaagtaagcttctagtttaagatcaatttcggcattcgttttagcaacgacttgcttcccttgtttcttagcgacggcctcacccaacatttgcgagtataggtcaaacccaacagaatcgataaaaccatgttgttgcttacctaataaattaccagctccccgaatcgataaatcacgcatcgcaattttaaacccggaccctaattcggtaaagtccttgatggcctgaagtcgtttctcactaacttccgttaaaaccttatcgggtttatacataaagtaaccgtaagcaatccggctactacgtccaatccggccgcgtaattgatagagctgtgaaagaccgtaatgatcagcatcttcaacaatcatcgtattgacgttaggcatgtcaaccccggtttcaataatcgtggttgtcaccaagacgtcgtatttaccttggacaaagtcgtagatgacaccttctagttgtgcctcggtcatctgaccatgtgcgaacccaaccgttgcttcaggaaccagcgcttgaatctcatcgaccgtgcgttcaatgtcactcactcgattatggaggtaaaacacttgaccattccgttctaattcccgttcaatcgcttcgcgcatcgcaccggcattttgttccatgacatacgtttggataggatagcggttagtcggtggcgtttcaatcacagataaatcacgcacaccgagcatcgacatgtgtaacgtccgtggaatcggcgttgccgtcaacgttaacacgtcaacttgtgccttcaactgcttaagtcgttctttgtgttttacaccaaagcgttgctcttcatcgacaatcaacaagccaagatctttaaacttgatgtcttgcgataacaagcggtgggtgccaatcacgatgtcgactttgccctctgctaagcctttgagcgttgccgtcacttctttgcgcgttttaaaccgtgacagtaaaccaatttcgaccgcaaaatccgcgaagcgtgtcagcatgttttcataatgttgttgcgccagaatcgttgttggcactaaaaaggccacctgtttaccggcttcaacagccttaaaagccgcccgcaaagcgacttccgttttcccaaagccaacgtcgccgactaataatcgatccattggacggacgcgttccatatcatgcttgatttcagcggtactgcgtaattgatcatctgtttcaggataggggaactggccttcaaattcagcctgtaattgatcatcttttggaaaggcaaatcccttttcagcctcccgttgcgcataaagttcgattaaatcatcggcgatatcttcaatctttgccgaaactttactcttagtcttttgccactcgccaccgccaagcttattaatcttcggtgttttggcctcggcagagacgtatttttgcaccatattgagttgagtgactgggataaataacttcccattatcccgatacaagatggtgatgtagtcttgatgaaccccatcgacttccaaggtttccatgccgacgtattcgccaatcccatgattgacgtggaccacgtaatcacctggttttaattcgttataactctttaaccgttctgcattggccaaggtttgccgccggacttttttcttcggcgccgtattgaacagttccttttcagttaagaccaccagttttaaatccggtaattcaaagccattttgaagtgacccttgaatgatttgtgtccgccccgtctccaactgagtcttattggcgatgacggcatcaatttcaaagtcgtggaacgtctgatcaatcttcttgacccgtttaggatcagacacgagcacaatgaccgtttgtttttgcttttgccaatgcgcaatctcggttttcaaaagcggcatttggctaaagaattgttgcaccgtccgcgtgggtaaattgttgagtgcatcgagttttaacttccccattcccttttggaacagtgatagatagagatgcgcatgtgtatcttttttgatgagcgcttgggcatccatcatgagtcgttggtctggcaacatgcggtgggtttccaacatatcggtttgccagttggccgcttcttcagtcaaaatccgctgcgtttctaaaatgcgcggatagtcatcaaaaatcactaagccactctttttaaagtaatcaatcagacttgattgatctggatacagataatcaacaaacaacgctaaattctcaacgcgttcaccggccaacaaccgttcaatcggtgtttcaaagtttgtcgccaattgtttttgttcagttttatccgttattttggccgcaaccgcctcataagctgcttgtaatgcctcaccagccatttccaattgtgctgtgttggccaataagtcagtcgccggcataatttgaacactatctaaattctcaatactccgttgcgtatctgcttcaaaagaacgcagtgaatccacttcagtatcaaagagttcaatccggaccggattttccgcatccagtggaaaaatgtcaataatatccccccgcattgcgaactcaccaggtttaccaaccaacttatctcggaaataacccatttcaccaagttgcgcagcaagtgcctggggatcaacttcactatcggtattgattgtgagttgactatcttgccactgacgcgctgtaggtaataaccgccgcatgcccgcgaccgatgtaatcacaattccttttttgcctgttgctaaaaaactcaacgttcgcacacgttccgctctggactcaggtgaactaactgccatttcagccgccatcacttcttcaactgggaaagtgtaaatctgatcactattgagtaaattactcaaatcatcagcaacttgattggcttggaacgtattactctcaataatcaataagggttgttgtttataaatcgtcgccaaaaacagggttttcgctgatcccgaaagccctgtaagtagttgtttaatccctggtcgttgattctttaaaacggattgcacctgtttggtctgccccagcattgtccttaaatccatgtaaaagttcctttactttcttattataatggcgcgaagaaacgtgctctgttgctaaccgcaaccaaacgcactctgtttttgaaacgtgtcattggcagtagattcctgcgctttgctacacttttcaaatcgccgcttgcagcgtcaattcgccaagttaggcaaatgctcagaatctgaccaactgccaacgacactctaattaaacttattcatcgttttcatgaagtcgtcgttttggcaccagtcttctagtgcttcgcatgcctggtctagtgcttgattgataattggtgcgctgtctttgtcaaacggcgttaagacccagttaacgactgtacttttttgtggatgttgaatcccaactttgacacgcttaaattctgagctttggacacttgcgatgatactcttaatgccgttgtggcctcccgctgaacctttttgccgtaagcgcaacttgcctagcgttaagtccatatcatcttggataactactaattcatctaggttaacttggtagtatttcattaaaggcccgactgaacgaccggaatcattcataaacgttagtggtttcactaagaaaatcgtttccccttcatatttaaagctcccgtattcagcttcaaaatcatgcttgtttaaggtcacattaaaccgttcgcataattgatcaatcaccataaaaccaatgttgtgttttgtctttgcatacttactgcctgggtttcccaagccaacaatcattttcattattaacgtcctctttttgactggcgctatcacgcaaaaattctgagcagttaattctccccagtcgccagttgatattaagaaccattataccatattcagtttatttctctctttgtgaaagaaatagttttctgaaaatttaaccaaaaatcgcgaactttggtgtaaattatgctatactggttttcgaaatgaagaattgatttacagaaaggacgtcattatattggcaaacattgaaaaagatcaccaaaaagttatcctcgtcggcgacggcgctgtaggttctagttacgcttatgcattaactttacaaggtattgcacaagaagttggtatcgtagatatctttaaagaaaaaacacaaggtgatgcaatcgatttatctgatgcattagctttcacttctcctaagaaaatctatgctgctgaatactcagatgcaaaagatgctgacgttgttgttatcacagctggcgcaccacaaaaaccaggtgaaacacgtttagacttagtaagtaaaaaccttaaaatcttgaagacaatcgttgacccaatcgttgaatctggctttaacggtatcttcttagttgctgctaacccagttgatatcttgacatacgctacatggaaattatcaggtttccctaaagaacgcgttatcggttcaggtacatcacttgactcagctcgtttccgtaaagacatcgctgaaatggttaacgttgacgcacgttcggtccatgcttatatcatgggtgaacatggtgatacagaattccctgtatggtcacacgctaacatcggtggtatcaagatttctgaatgggttaaagctcatccagaaattaaagaagaagaacttgttaagatcttcgaaagtgttcgtgacgctgcttacacaatcattaacttaaaaggtgctacattctacggtatcggtactgcattagctcgtattactaaggctatcttagacgacgaaaatgctgtcttaccattatctgtatacatggaaggccaatacggcttgaacgatatctttatcggttcacctgctgttattaaccgctcaggtatcacaagcatccttgaaattccattgacagaccacgaaatggaaagcatgcaccgttctgcaaaacaattaaaagatatcgttacaaaagcatttgctgaattagatatcgaaactcgccaataagctctttgctgttggtcaaacgactctcattaaatgagagtcgtttttttatggtgttaatattatcaactacatattttttatgaaaaataatacttttttatttctttttgggtgcatatcttgtatgctaactattagttaacgcctttgtattttatgtgatactggggtatgattaacctatgcagagattggagttgaggttgtgaaacttacgaagaaagcctacgtcgcccttggcgtagcagccgttatccttgttggaggttactcggcagtcagtcttcattatcaaaaagcattcttgccacatacgaccgttgccggtgtcaacattagtggccaatcagtcgcagacgctaacacagaactcttaaaaaaagtgaatcgtcaaaaatatacgctaaaggataacaatcaaacattgctaacttttagcggtcaagaagctggctttagccataattttaaaccgttattggaaaagattaaaaaaagccaaaacggttggtcttggctagtccacgtttttgccagtgaacaaacaactaaatcagaagacgcactcattttaaatgccgctgattttgacaaattctcaacggaaaccctcgaaaaggtcaacgctgatcgcaaaccttcagagaatgcccatattaacctcgagaatcatcagttcgatctcgtaaaagaagtctacgggaacacaattgatgccgctaagttcaaaaaagcagttgcccacggtattaaccaaggtcaagcaacaatcgacttaaaaaacgattatgcgcaacctgaagtgaaatctacggacaagcaattgaaaaaaactgccgatcaattgaagacgattgctaatgaaaaaatcagctattcagttaatggtaatgatttccaagttcctaaagaagacatccaaagttggttaacgtataacaacggtacaattagtctagataaagctgccgttaccaaatacgtttatcaattaaaggcaaagtatgatacttttgacaaagatttgaccttcaattctacaaaagaaggcacagtcactgtcccagctggaatttatgggtggagtatctctcctgccgatgaaatccacgccttaatgacagaagtgcctaagggcaaagatttctcaagaacagctgttatccgtggttccggaactgatcagaaaacgcgtagtgtcggttcaacctacatcgaaattgatttaaaagcccaacatatgtggctttatcaagatggtaaggtcacaattgacactgatatcgtttcagcacgtccaccacaagtcaccccaaccggtgtttggagcgtttggaagaaagaacgcaatgccacattgaaggggaagaactttgatggggtcagcgaatacgcaagcccagttaattactggatgccaatcgatgaaactggcgttgggattcatgattcgccatggcaacctaagtacggtggtgactggtataaagaacacggctcacacggctgtatcaataccccacctggcacaatggctaaactctacgatactgttagcgaaggcattccagttgtagtgatttagacgtagtgtactagcaacacctctcctctacggattaaccagaggtagctgacctacagaattcgtttagaaaaagtaagctcaacgattaaatacaaagtaggaataaaattaacttttatccctgcttttttattgcttagatttcacgttctttctcatcgattactaatcaagttttcgctgagtcgaaaaactagttattttaatctgcttggtggtatgctatgattacattagtatatgagagaattttaatctaaggagaaagcctatgctcattaaatccctagttttacctaaagaacgtctcaccacaattgttgaatcggtgaccttagaagaagcattacagctactagaagagtctggttaccgttgtgtgcccgtcctagatgctagcggcaagatcttccgcggtaacatctataagatgcacatctaccgtcataagtctcaagggggcgatatgcagcttcccgtgaccagcttattgaagaatatgaccaagtatattccagttgacgcaccgtttttcaaagtattcttcaacattaaagatttgccatacatcgccgtattagacgaagatagcaatttttacggaattctcacgcatagcacgttattaaatatgctttctgaagcgtggaatctcgaattaagtagctatgtactcactgtgctttcttctggtgaacaaggtgatttggttgccatgtcgaagattatcgctaaatatacctcaatcgccagctgcatcaccttagatgctaagcaagatgaattcgtacgacgcacccttttcaccttgcctgctggacttgatcttgagattttgaaaaagattgtttataagctcgagaaaaaaggctatcgtgttcctgaaatcgatgatttacaatctgataaggcgctccgtgatgactccaaacttgatgatttagtttaacgcaaaaaagggcagtcctaattaggactgccctttttaatctttatgatttcatttgtgcatcaaagtgcacaactttatccacagcatacattactggtgcggtaatcaccatgatgactgcttctgaaagtgccaacgaaatatacgttggccagaatggaatgtgtgtgctagcagtagaaccggttaacacaatcatccacgcaatcatacacatcgaaacggtgaacaagagaatattgaccaccattttttgccaagtttgttttaaatagggcatcacaagcgttaatacaagcagcgccaataaagtttgcccgccaccaaaaagcgtatcgagtaacttgttttcagaactgaaaaagaaattgaacactaataccccaccgaaaacaccccatagatatttcttattgaagaccactaaatggtttaagccttccgaaattctaaattgaatggctcctgaagcaaatcccaacatacctgggaataacgataaaacaacgtataatgctgccactaacccgtttagaatcaccgtttttaatcgactttgattcgtcatctttgaatcctcctagtttttttgcgtgggatggttacgaaccacgttttttcgaacagctaccatcatatcatatttaccggctgttgataaaggtcaaaaaaaagagaacccgcttttataagcgggttctcttcattctttctttttggtatttatgtattaaggatttaagaccgctttaagtccaacactaatggtgagcgcccgatcgacttgtgccatcttatccgccactaaatgtgtgacgcgatctttcaagcgttgtttatcaatcgttcgtacctgttctaataaaatcacggagtcgcgttcaacaccattatccttggccgtaatcccaacgtgtgttggtaatttcggtttttgaatctttgctgtaatcgcggcaacgattacggttggactatggtgattacccacatcattttgaatgattaaaacaggacgcatgcccccttgttctgaaccgaccactggtgataaatccgcataaaaaatatcgccacgctgtattaattctcccacttgttctccctccaattaggatcaatcaactacgcgaatgtgtgcgtacgcctcactttcgcaagcgttaaattcagccgcaatttgactgttgatgctagccatctcagcgtacccgttaatgacgttatctacttttgactgtctggtcgccatgaattcgtgaagcgcatcttgaatcaaatcattctcatcaagggcatacacctcacaatactgcttaattgcttggaccaactcaacgtctaatttaacggataattgttcacggttagctttcatctgcatcaacctccgaatcaacactttaacctttattcatcctaccacagaactggcgataatcaaattctcaatccttaatgttcatcaattccactgtaaacccgtggtaaccgatcagataaaccacagataatttcatagtgaatcgtccctgcataatctgcgatctcttgtaaagtaatttcgtcatcaccacttttaccaacaaaaactactttggtccccactggatattgcttaggtaaccgaatcatcaattgatccatgcagacccgaccgacaatttcacaccgatgtccatccaccaaaacggttgagccttgcatccgtctagaccaaccatcggcgtaaccgattggaatcgtcccaatccattcagattcactcgcttcataagtcgcaccgtaaccaatcttacttccggcttcaacttgcttaacaaagaccaattctgattcaagacttagcgccggtttcaatgcataaggcaattcaggaatcgcattccctgaaggattcaatccgtacatactaattcccattcgaattaaattctcattgcaagctgagtgccataaactcgtggctgaattcgaaacatgcacaaatcgtggacattctggtaacacggctactagttcattaaaccgggcactttgttctttaaaataagtatcatcgggatcatccgcagttgcgaaatgggtaaaaatcccttctaaatcaaaatatttcgcatgtgctttgataaatgtggctgctgctagtaattcagtcgcatttctaaaaccaattcgccccataccactatccacactcaaatgaatgtgcattggttgtggataaggtatttgttgggcaatttcgtaagcagcttgcaaccattcgagtgagccgaccgtaatggagatttggttggcaatcaccaattcgatttcggtgggctgtgtaatccctagcaccaaaatgggttccgtaaagttagcacgccgtaaagctaaggcctcatctaaaatagccacacaaaatcctgcagcaccagccgcttgggccgcttctgcaacaggaatcatgccatgcccataagcatttgcttttaagacagggaaaatcactgcatctgtgccttttaaatcctttagttcattttgaatattttcataaattgcgttttgatcaactagaatgcgtgttggtcgtaagtagccgactgtcatcgtctcaacctctttccaaaataacttctgccatcactaacgtcgttgtatgcgaaagtgatacgtggacagttccctcaaataaatcttgtttgatgtagggtttgccctttgcatcatttaacgtttcaatcgcttgcagttgtacctgtccaataccagtcccataagctttactaaaagcttccttcactgcaaagcgccccgctaaaaattctaacgcacggcgccccgtataccgtttaaacagttcatattccttagctgttaatactttttcagcaaaatgactattcttactctgtgctttttcaaatcgatcaatttcggctaaatcaatgcctaatccagcaatcatcgtcttcgcccctagtaccctatttttaattagtttaccacaaaaaagacagagactgaacttacatctctgtcacaattgactatatgaaaacagcggccgaccaagttggccgcccgctgtttttaaaaagtcttatttatcgtttgtacgaattgtgaagttccgttttgaacggccatcagtcttcttacggttgtcacgattgtcattgctacgacgtttgctgctatcgccgttgccactgttgcgacgaccgtctttgttgtcattaccacgacgtttgccatcgccattaccacgacgattgccaccgcgatagccgccaccgttaccgccacgacgattgccgccgccattccggttgccgctacgattgccaccttttttacgtgaaggcaatggacgttctggtgttatcttaacaggaactgattccttgctgattgtcttcaaaagcactgaagctaattcaacgtcagagaattgtttcaataattcttcagcttcttcgctgaatttagccaattggcctttttcaatcattgagttgatgtctgcaaccgctgcagctaattggcccttgaaggcttctttttctgtaggtggttgtaatggtaacatccgtttcttcgttaagttttcgatgatgtgtaagtattccatttcgtttggtgttacaaaagtaactgaaacgcctgacttaccggcacgacctgtccggccaatccggtgaacataactatcaggatcttgaggaatatcgtagttataaacatgggtcacacctgagatatcaagaccacgagcagcaacgtctgttgccactaagatatctaaacggccagccttaaatgatttcaagacgctcatccgtttttgttgtgataaatcaccgtgaatcccttcagcattgtaaccacgagccttcaaaccgcgtgttaattcatcaacacgccgttttgtccgaccaaagattaatgttaattcaggtgattgaacatcgaataaacgcgtcataatgtcgaatttttcgaagtcctttgcccgcacatagtattgatcaattaagtcagccgttaattcttttgactttactttgatcatttcagggttagtcatgaagctcttaccgattttcatgattggtgctggtaatgttgctgagaataaaagtgtttgacgttggtctggcacttgtttgatgatgctttcgatatcatcaacgaagcccatgtctaacatttcgtcagcttcatctaagaccaatgttttcacgtggtctaatttaactgtgcgacggttgatatgatccaataaacgacccggtgtcccaacaagaatttgtgggtgatcttttaatgagcggatttggcgacgaatgtcagccccaccgtatacaacttgtactttcgctttacggtcgcgacctaagcgatagagttcttcttgtgtttggattgccaattcacgcgttggtgaaatgatcaatgcttgaatgttaggattgtctaagtctaagttttgtaagattggtaaaccaaaagcggctgtcttaccggtaccagtttgtgcttgaccgataacatccttaccagctaatgccaatgggattgtttcgccttggatgggtgttgcttcttcaaagccagcgcgttcgatggctttcataattggttctgataaacctaattctgcgaatttcaaatagtgttcctccttgttttgtaaaaaacatgccattacaaaacaggtccacttcgtcaattgcaccattttcaaaaatctgtcttgtaatataattgttttcaaaagcctttttcattaaaaaagctccttaatagcttatcatgccacaacttaattagcaaacggaattgctccaattgttaatctaattccatagcttcaatcgctaaacagcgtgcctgtgcagttgtctgtcaattgctaatcattaattaacttcagtatcttgtaaagcagcgactactttttctaaatgtaagccatgacttgcctttaaaacgattaaatcatcaggttgtacctgcgcttgcaagccagcaattaattgcgtttgttcatggcggttaaagtaatggaggcgttctggtgcataacgctcttttaacgtcacatataatggttcaatttcatccccgaacaagaagacctcttgaatcatcgtgggatctaattcttgggccaaactttcgtgtaatttcttgctggcagtaccaagttccaacatgtcgcctaagacggcaatccgccgcccgtcagtctcaaaatggctgaaattgtgtaaaacttctttggcagccgttgggtttgaattgtaaacatcactcaacatccgttcacccttttgaccaacaagccactctgtccgattacttgtgacttcaaaattcgccaaggcttttttcattaattctggtttaatatggaaccgttgcccaaccaaaattgcggccaacgcattattgacattataagcacccatcattggaatcgtaaacgtcatctctggccaagcattcaacttgaatgacgtttcagtttcacctgcacggacttgtaagggatataagtcattggtcgtcaaattaccgaatgtctcggttgtgagttcgccaacccgttcagtcaatagcggttcgtcgccagcgtaaattaatagaccatcttctttgagcccatctgtgatttccatcttagcatcggcaatcttatcacgcgtcttgaaaaattcgatatgggcttccccgatcatcgtaatgactgcgacatctggcatggctaattcactgagcgcttttaattgacctgggcgatccatccccatctcaatcactaaaatttcagtattagcttccatcgataaaatcgtttgtggcacaccaatttcattattaaagttagcttgtgtcttgtgcatattgtactgactacctaaaacagcagctgtcatatctttcgtcgttgttttaccattactaccggtaatcgcaaccactttgggattaattttttggagataatgcatggctaacttctgataagccgctagtgggtctgtaaccactaatacaggaaaatcagttggctgtgcatcatgattggcagcccaaaaagttgccactgccccattttccttagcttgtccaacaaagtcgtgaccatcacgcataccagctaacggtacaaacaaagcgcccgcatttaattgacgtgcgtcaaacgcaacattcgtcacttcaatggttgcccattgttcaatatcgtttttagccccagtgactcgtgcaatttcacccaactgcattttcatatctcaataactcctattactctgtgtgcatttttacgcacgctttttttagttatggcttaaaatactacgcaatattgtaccatagtttcaaaaaagccccaaaaatgattgaccaccaattaagagtaccaccgtgaatagtcatcaacctgtttatcatttggtcgatattgttgcttagtcggactccgccaccctttaaaagctgttttgcgtagtgcatgatcattttgcagcggtggttggctatctaaccgggcgtgttgccgatcattccgattagcataattaaacgattcaccgtttagtagttgccggagtgtgccatcatctagctggtaatggtcaggattactatcaatcagaccatcagcctttactttaagcacttgccattgactgataaatgctccagatggtgctagaataaattcactatgaaaatccggcgtgagtcgttttcgattccaatgcgttgttgggcgctgtccgttgcggtatttattatggagccgagctggttcacgccgcagccaataatgtggctgggtcgcttgtcgttttcgtacaaaccgcgctaaggcttgttcatctgtttcaccagagtgttgaaaataatggcggatatagcgtagattctgccgatctaaatacattctgaattgatgaatccgtttatcggttaaaactcgaccaacaaatgcacgttgcacactttgcgcaaaggttgctaaaaaaggcgcatctggtgctaattgcgggtcaagttgataatcacgtgctgttaattgcaaaaacgcatgctcatccaactgcgcccctaaatgcgtgagcactaaattgatccgctggtaattaattactggttgtgcagttcggtccccgtatgcttcaaaaagcatttgataaagtgctgagcctacttgatgtaatgcttgccaattgtgttgcaaaatccttttaagcgctgttggttgcgcagcaagttgtcccgttaaatgggttgcataagcgcgtaaactcgcaacgtcccaattagcgcgttctaactgttcaaaatgggccaccacctctgcctgatcaacaatccgataccgctgcggtagtgtttgccgccaaagatccattaattgagtgccatccgttttagttgccaacgttgtgatgatggcgcgttgaatcattgtgcgttgttgcgtcgataatgttagctggtgacgcgcatgcaatgccaataataattgtccacgcacaaccggtaaatcaatcatggtaatctgtttgctcggtgtctcattcaattgcattattagagtagattgtaacgccattaactgctggattggggataatcgcacactgatcactcctcttttcctttattatacaaaaaaagagagggacaaaaatgaattttgcctccctctatataaaacgtgttctatcaactattacctacagctgatgcgttatgtctttaaaacattacatcgctcttaatttagcgactcgttcttcaatcggtggatgactatcaaataaatgagcacccgaccgactaagtcctttaaatggatctgagatatacaaagctgcgcttgatggatccgcagcttgcattggctcactgtcagaaatcttcaataacgcattgatcaaaccttgtgggttccgcgttaattcgacaccagatgcatcagccaagtattcccgatttcgcgacaacgccatctgtgcaatactagccgccaaaggtcccaatatcaacaataggatcgaaaaaaccaaaccgatgatattacttgcaccttcttcacggtcgttatcacgactgcggccgccgccccaccataacatgttgctgccgatgttcacgagcattgaaatcaccgcagaaagtgccaaggcaatcgtttgtaaccgaatatcgtaattgcgaatatgggagacttcgtgagcaattaccccctcaagttcctcccgattcaaacgcgccatgatgccagtcgtaactgccactgcagcatgttgtggatcattgcccgttgcaaacgcgtttgggctaggatcgtcaacaatgaaaacccggggtatcggtacttgggcgaccatcgccatgtcttcaacaatgtgccataaatcaggatattcgctagcatcatggacttcggtcgcatgattcatctgcataacaacgttggttgagtttccaatcatcatcgccatataaacggcggctaaaatagccgccaccacgacaccactaatcaaattacgcataaacagataccctaatgcagccccaattgccaatactaaagcaaaaaagccaatcatcacatataccgttttacgtttgttctgttgaatttgttcaaataacattcccaatcacaccctattcaaaggaaactttaggtgctgctttttcctcaactggcgtttctaagtaagctgtcttttggaaattgtgagcacctgccaaaatattaccagggaaagtttgaatttggttgttgtaacgggtagcacttgagttaaacaattgacgtgcatacgcaattttattttccgtattcgtcaattcttccattaacttcgtaaattctgcgtccgcttttaaatctggatagctttctgacaaggcgaaaacgcttttcaatgaatccgttaattgattagaagcctccattgttgcttgccgattatcagctggcatttcaaccaattgattccgcatcttgatgactttttccaacgtgtcttgttcatgcttagcataacctttcacggtcgatactaagtttggaatcaagtcattccgccgtttgagttgtacatcgatttggctccatgcttcatctgtccagttccgactcttgaccatgttattgtaggtgctgatatagaagccaaccgcgccaaccactaacaaaataatgataataataaaccacaacatacgcgtatcctcttttctttaatgttgtcttcatattatcagactcgctacaacaaataaagaataggttgccaaccttaacaaaaccttggtttgacataaatggtaaaattaaagagttaccaattttgggagggatacttgcatgtttactgcacagccagcaattgcgaatgttgatttaactgcaccacggatgattgtcgatgaccctcggattcccatgagttatcaggcactttgtcaaacaaccaatggcggttttttgactaactttagccttcctacgagtgagccaacaagtgatggtctcgccgacgttgagtgtcattatttagctgggattgctcacaacggtgaagcagtcatccaagcccccgacttgcccgattacttagtcccttttagtcagcatcaacagcagtactttgtatttgattgccaacaagcctcagctgaaccaccgattcgctacatagatactgaggtcgatcaatggttaaccgttgctgattcgctggatagttttctcgaacaattaggtcccaaagtaattgatctaaatccagataatgagttaacccctttgcagcgtaaccattacttgttagtggcacagggagcacagctagacactttgctagcccgttatgaagccgatgctgataaagaatggctgtttgattggctactctattttgccgaacatggtacaccagcccaacaagcaagcgcattgactgcctacgacactcagcggttgtactttaaacgccagctgccacgcgctaaagatgcgcaactgactgccctctttgaacaactcccacacttaaaagacgcctaccacgcacatcagcaagcgtggtcgccgctttaactttttagaatcgagatgatgacaccatgttgactaacattcgtcaacgtttattcagacgccgcgcacaatgggaacagaacctcgtcgttttatggtttggtaatttcatggccggggttgcttttagtttgattatgccatttatgtcgttatacattgacacacttggcaactttacaacggcccaactgagtttatggagtggggtgacctattctattaccttcttggttaccgctctgatttcaccatggtggggcaaaattgctgaccgccgtggtcgcaaattaatgttactccgcgcctcattaggactagcgattgtcctgggtgcgatgggcttagtccaaaatatttatgaattaattggtttgcgactattacaaggcttcttctcgggttatatcagtaattcaaacgccttaattgccacttcagcaccacaagaaaaaagtggtcaagctttaggcaccctgaccaccggaagtgtttccggaaccttattaggcccgttgttgggtgggattatcgcccaagcaaccggctatcgaacaaccttcttcattaccggtaccatcttgttcatcgtctttatcctctgtctggttttcgttcacgaagacttcacgccagtagaaaaaggcgatcaagtacccggtcggcaactgattcatgaattgaaatacccgcatttaattatcggcatgttcgtcaccacaatgattattcaagcctccaacaactcaattagcccgctgttgagtttatatgtccgtcaattaatgcatcatggcaataacgtagcgttagtcagcggagttgtcgcggctactccagggatcgcaaccttaattgccgcgccgcgttttggtgcacttggcgatcggatcggttccgagaaaattttactcggtggcttgatcttcgccgtcttcgtttacgttccgcaagctttcgttcaaaatgtttggcaactcggtgccctgcgtctgctggttggggtcgccgatgccgcattgttaccgcaagttcaaacgattcttgcgaagtactcaccccatagttccgccggacggattttcagttataaccaatccttccaagcaatggggaatgtcgccggacctttaattggttccagcgtttctggcctattcggttacagcggggttttcctatcgacaaccgttttagtaatcgtcaacctcttctgggtgcgtcagaatacaaaagtcttacgcgaagaacatgaaatacaaaaataatacaaaaaagtggtgtcgctcattttcagagcgacaccacttttttgttgaaacgtgctttttgtggcatatttctgcgcttaacagaatttgccaaatcggtgattacaatcgccaattcgtcaaatccagttaatgctcaaaatataagcgccacaaacgcactctattttttggtaaacatcagtttatctaaccagtcccggttatgtttaatacagaaatagccgataatggcgattaaacatgatcccaagacatccgctagtaagtcccccatcgtgtctaacaaggctgcttggcctaataaaaggtgaccttttgccatataacgttgcatgtttaagcctaacaaactatcgccggtaaattcatagaattcccacaacacaccaatcgtactcccaaacgttgccgcaaacaaactcatgagtaaggctgaaatggtttgacggagttgttttgaaatcaatacgttaaagaccgtataccctaagcccgccaataacccggcactcaagacatgcaagaatttatcccagtagtataagcgactataaaaatgtaatcccgtccccaataaaatcgaacagtatacaaagattaaataaactgcatatagaatctctggaaaccggtatggcataaagcgttcaatgataataggtaaggtcgcaatcaccaggcctgcaaccacttgtaaaacggcaaaagacaatgttccgttgtctttggggttagtcagcatttgttctaagtaataaccaatatagattaattgactcacaatggtgaagacataaagccaatctacccaccgccaatttgttttttgttttgccatgttattcatcctttccattcaaatgatacagcgtgacactccgactaagtcgcaagtatgcgatgaaatgaaagatattgcccagcaaaatcaacagtgcccctagccagctattaatctgaattccgacaatggcaatggcgtaaatcaagacacttcgtaagggatcatttttaatcgtttgataaaattcctcgtgtcgctgttcatactgacgcattagttcatgatgcagtgccatataccgatataatacccaaaacaaagctgagatgactaatgcaacaatcgcatacgatgtaaaagcaaatcgaatatcagcgccattttgttgagcaatcgattccgacaacaaactagttgggtaattaatcagtgtcactgcaaataaaatactgagattgatcacgtttaactgccagttagtttgttttattttcgcaaaataatcgtgatgaaacaaccataatgtccccacataaaaaaaggatagtacataggcagccaaagttggccactgtgcaatcaccgcttgactcaaatgccctgcttgatagtccggcactttaaagtctaacactaatagtgttaataaaatggcaaaaacgccatcgctaaatgcttgtaatcgatcgattttcattattctttccctcacaattcgactatggtcaaactagcgtgggtagtgcataatagttcataaataattcccttaactaggaggctctatgtcatcacctaccactaaaaccacgcagtttaaaattatttttgttttatatagcttacttttaggattgttgattggtggcatagcggccgcctttttagccctcattaatttcagtacacacttaatttggcaagtcggttattcgcatttcaaccagccattttatccgttgcttgttggtctatttggcggattactcgtcggcttaatgcaacgttattgggggccttatcctaaaacaatgcatgaaacactcagcgaatttaaacaaaccgggtccgttgcctaccaacagcaagtcggtaaaaacattatcgccgccttagttgtattagcctgcggcgctagccttggccctgaagccgcgctctcgaccaacgtcggcggcctaatcacttggttgggcgatcgacttaaactaaagaaacgtttttgacgatggggattggtgccatgctagcggccatcttccacgcaccgctagccggtgttggtgaggcgattgagacaacctccttgcgcgatcatttcaaatcacacttcaatcaagttctattatacattctcacaaccgcaactgggattcttggtttcgccttggtcaaccaactcttccccaaagaaagtccatttacactgcacacaccaatcattcattggacattaatagtttggccacttcttattttagcattaattgtcggttgagtttttggcaatctattcttaaaaatagaacaatggtgccagtggctctttgatacgattcagcggccggtcttacttgcaatgatagctgctggtgtgttcttgggtgcttgtggtctattgtcgccttatttactcttttctggagaacactacttgttcacctttaccaaatccggtttagatcaatcattcatttatttactcttaatcggacttggaaaaaccgttctaactaatctgctatttgcctttggttggcggggcggtaaaattttcccagccatctttgcaagtgcggcaatcggtttaagtctcgccgttgtattgccatacactcccggcctcctggttgccacggttgtcgctgtcagttgtacggtgatcgtggcgcaaccgtacgtcactgctactttgttactctttcttttcccgattcaatttttcccagtcattttgctagcgtgtctcgctagtcatcgaattcaaaaaatgttgattaaatagctgattgccgtttgcaattggctatttttatggaaaaaaaggcaaaaaaaaaccagggaaaaattccccggtttcaaaataattatttggcagcgttcttgtctgcaaaaccatattttttgttgaaacgatcgacacgaccatctgcttgagtaaacttttgtttacctgtgtagaatggatgtgaatctgatgaaatttcaacacggattaatggatatgtgttaccgtcttcccattcaacagtttcagctgagttagcagttgaacctgagatgaacttgaagccagttgatgaatccataaatactaccttgtgataatctggatgaataccttgtttcatgtcttttccgctcctttttgctaaagttatctgcatcaattcagatgcacaacttaagtcttgccctgagatatttgctatgtcagagatatttgtttacataaccattaaatattagcatgaatgctaacaaaaaacaatagatggttaacttattcttcaaccattttgacgattgcgcccagacccgttagtttatcaacaacgcggtcatagccccgcaaaatattacttgcgttatcaatcgttgtcacaccattggccattaagccagcgatcattaaacaagcaccgccccgaatttcatcggcggatacttcggcaccttgtaacttgtcggcatgatgtaaaataatcacatcattttcgattgagatatctgcacccatccgaattaattctgggacgtgacgtgttcgtttaggataaagggtatcaaccacaatgccttcaccttgcgcttttaataagagcggcgttagtggttgttgcaaatccgttgcaaagccaggatatggcatagttttaatttgaaccatttttaaattaggtgatggataaacgaagatactatcttccttaacatccatcttaacgcccatttcctctaacttagcgaggtaagcgtccatgtgttcactgatgatgttcttgacgttcacgccatccccgatggctgcagccatacttaaataagttcccgcttcaatccgatcaggaataatggtgtgtgtattgcgcccatacagatgttcaaccccatcaatgcggataatgtcagtcccagcaccgcggatcttagcacccatgttgttcaagaatgtcgcgatatccacaatttcgggttcgcgtgctgcattttcaatgacagtttgtccttcagcacggacagcggctaataataaattaatcgttgcgccaactgatgccatatcaagataaattttagcaccgtgtaagccgtttggtgccttaatttggatagcaccgtggttattagtcactgtcgcaccaagtgcttcaaaccctttaatatgttgatcaattggtcgtggaccaatatcgtcgccacctggaagcccaacgattgcttccccaaaacgacctaataaagcccccatgaaataatatgaggcgcgtaaactttgaatcttcccgcttggaagtggtgtcgaaataatgtgggttggatcaatttcaaccgtgtcatcaacaaaagtagatgagacagacatatcttctagaatggatagtaggctgttgacgtctttaatgtgcggcacacagtctaaaacgactttcgactccgccaaaatagcagcgggaataatcgcaaccgtgctattctttgcaccgccaattgtgacctctccagataagagattgccaccttgaattaacatttttttcatttttagatttccccgttcgctctgcaacaaaagaaccgccttcagtttcccacttctcctgtggtttaaaccagaaggcgcttttgatatttttaagtttttagttttattttttaaaattggaaaacggcttcaatctactcaatgccgttgataattagtcatacatgtataataataattaatcagcacataaattacaaggcatttagggataacatttactttttaattttcatacttagtaaaagctaatcatcgcattcaattgggctatcgaagtctaaaaatgtaaggcttttcaaaacggaccatctccattttcacaactatttttcggcatacaaaaagacgctactttgtcgtgatgactagtagcgtcttttatgaaacgtgcttcctcgaactgccttttccggttaacctaaaaataaggattatggctaaagaacgccataatccttattttcttgttaatcctcaaagccaacccgttcgagtcagcactctacattgttgcgccaataaatgccttgaacaagccttctggtttgtttgggcgtgataggaattctgggtgatattgagctgccacgaagaatttgttttctggaatttcaatgacttcgactaagcggttgtcaggtgaagtcccggcaaagactagccctttgtctgtcaacaattcacggtattcgttattgaattcataacggtgacggtgacgttgttggataacactttggttatcataagcagcagcagtctttgtacctggttttaatttacatgggtataaaccaagacgttgtgtcccacccatgttttctaaatctttttgatctgacatgatgtcgattaatttatgttttgcttctgggtgtacttcgccagttgttgcatctgtaatgccagcaacattgcgggcaaattcgatacttgccatttgcatccctaaacaaataccaagatatggtacatcattttcacgcgcatattgaattgaaaggatcatcccttctaaaccacgatcaccgaaaccaccagggacgataatcccatcaaagccagctaatgtttcagcaacattttctttcgtaatatcttctgattggattggtgtcactttaacatcggtgttataagcataaccggcatggcgtaatgcttcgttcactgaaatgtaagcatcttgcaattcgatatatttaccaaccaaggcaatcttcttcgtgccttcgaggttcttgattgtgtgtaacatatcaatccattctgtcatgtcagcttctggtgctgtcatcttgaagtggttcaagacaaaatcatctaagccttggttcttcaataacaatggaatatcgtagattgattcagcatcgcgtgattcaacaacggcttctggttcaacgtcacagaattgggcaatcttgttccgcatgtcatcaggaattggtttttcagtccgacaaaccaagacgtttggttgaatcccgatgctccgtaattctttaacactgtgttgtgttggtttggtcttcatttcaccggcagccttcaagtaagggaccaatgtcgtatgaatgtagatgcagttttctgcgccaacatccgccttcatttgacgaagtgcttctaagaatggtagtgattcaatatcaccaacagtcccaccgatttcagtaatcacgatatctgaatcagtcgttgtagcagcccgcatgattttttctttaatcatgtttgtgatgtgtggaatgacttgaacagttgcgccaaggtattcacctttacgttctttacgtaaaacttctgaataaattttacctgtcgtcacgttagaatatttatttaaattattatcgataaaacgttcgtaatggccaagatctaaatcagtttcagtaccatcatctgttacgaaaacttcaccatgttggtaaggactcattgtaccgggatccacgttgatgtatggatcaaatttttgaatcgttacctttaatccacgattctttaacaaacgaccaagtgaagccgcaacaattcctttaccaagtgaagaaacaacgccacctgttacaaaaacatatttggtcatataaatattctccttttcttcttagcattacgctaaacattcatgcttttgggaaacaaccaaaaacaaaaacaagctccctattcaaaatgaacagggagcctgttaaccgattctggcttcgcaattaaagtaactgcaaagcgcccaaagaatataatacaagaaatggcaattagcgtcaagcaaaaaaattagtcatttctgcgccgattttaaatcgcctatgctacactatttgcatgacctactttgaaaggatggcccaccatgctacaagacgcgttactagctctagatatcggcggttttgccgtcaaatatgggatttggacgaaacaccaactaattaaccaagcgcaattccctacaccgctaacacgcaatcgcttctattccgaagttgaacaattacgtgatcaatttgcgaccgactttcatttaactggaattgcggtgagttgtcctggcgatccagatgaacagactggcatcatccatggcatgagttatgtgccatttttgcacctcggtgaatttcaaactgaatttgcaacgcgccttggtctgcccgtctctctccaaaatgatgccgacagtgcagcactcgccgagatgacagctgggattggtcaaggtcatctgagcgccttattcacaataattggttctgggattggcttatccattatcgaaaatgggaccattctcaaaaccactgctgataaaatcgataacttcgaaaaattcatcgcagatgccattaaaacactcaacaattcaaaagtctcacccgtccaaattggcaagactgtctccctccgtaattttaaactccccaatacaatcgatggcaaaaccgtcttcgaacttgccgatcaaggggatccgattgccacccaagaagtcacacagatgtatgctgcccttgcggaaatcatgctctttttaaacgttgcttacacgcccgagattattggtgtcggtggtggcattagtcagcgaactgacctactaccaaaattaaacgctgcgattgacgcacttttagccgatgacaatagtagtattaatcgttactggcaacgccgtgcaggggcaaccacccctattcctgtgccacacatcgaaatttgtcacttcaaccaagacgccaacttaatcggcgcggtttaccattttcttgaacgagagtgtgtcgtaagtcgggtatccgacgaggattagcttaaaaatattaaacgcaaaaaaaagacgccaaagttaactttggcgtctttttttatggcaacgaatcggaaacgtctaattaaagctcgtcatcttcgtcttcgtcgtcttcatcatcatcgctaaattcagataattgaccttcgataccgtcttctaaggcatcgtcgtcttcatcatcgtcatcgtcaccgatgttttgtaagtcagctttgtattcagttaagtcatcaccagcaacgtcatctgtagctgctaaatcaacatcatcatcagcatctaagtcttcgtcttctggatcatcgtcactgtaatcaatcacatcgtcatcgtcggtaacatctgctaagaatgcattaaccttcttacgacgtttcttcttagttggttggtcttcttcatcttctggatggttaacttcttcatcgacagattcatatgggtaccaagaacggaggccccaaacgttttcgcctaaagaaatgaaactaccatcttcatttaaatccgtataaaattgtgataagcgtgcacgcacttcttcatcacttttgcctaaatagttttgaatttcattcgttaagtcagcgaatgcaatcgtgtcgcctttttcttctaaaattgcatgtgcgacttcaatcattgatagttcttctttattttggcctttaaaaacgtctaatttcaaccagtacacgtcctttcaacagtctatccttaatcatactagcttaagctgtaaaaatcaatcgtaatttgtaatcccccacggcttgattattgatggcaagttggtaatgaaccgtaatttcacctgataacggttgttccttcaccatcgataataaatgggttgtcgttgtgagcactggcatgttgccatattttgtttggtaaattgatccgaggtcttcgccttgcttaaagtacaaccgcaattgcgtctcgtcttcttctgtgccccgcgttaattgaatttgaccgtcagcagccaatttaaaccgtaccgcggtggcttgttcaccaccgtgttccagataacgtaagtaaagtgactctcccattttgacaacttgaccatcctcatcgaaaacgtgtttttcaagttgcccatcttgttgaatttgcgtttcaaggtgtaccttgaccggaattccgctttgacttgccataaataacttcctttaattttaattaagtagttctattataagccattcaaaatttgagcgccagaataatccgccaattctctttgaccaacgtaccgattgcagacagcgcctagaatttacgctataattaagaagagtttttaattttcggaggtgattaccatggatgatttagcgactttatctgccaatcaagaatgggctattttaacccaacattttgaaaaagcggctggaccactcgcttttgctcatgctaatagcctcttagctttgagccgcgaattacaacaacctattattcatttttggacgcttgctgacaatgttattttgggcatgatggatacaaagttacctgcttatccacaagcggttgccacattagaggctgcacactatgcccatttcgtgcgtaacgctggtggtttggggattgtgacggatgccggcgttttgaacgtcagcttctatcttcctgatatggcggatcacctaagcattaatgccgcttacgcgctcatgcaccaattgttcacaactgcctttgcagactatcccgtcacgattgaccatttcgaagtcactcactcctattgccctggcgaatacgatctcagcatcaatggtcaaaagtttgccggtattgcccaacgccgtgccaaaaacggaattaccgtactcttatacgccagcattacaggcaatcaacaggcacgtggcaaactcatgcatagcttttacactgctggccaagcacaaagccaaacgcggtggactttcccagcggtcatcccggacaccatggccaacctatctgatctgttaaacgtaccaatgactgttgcaacagccattacgcacctacagaccgcttttagccggttggttcaacaaccacaactagttgacctcacaccacaattacaaacgaaagcttatcaacaacttctacttaaaaaccaaacagcactccaccgttatcaagtttaacgggcctcaaaaaggagattatattgtgactaacaccgctattaaactatcgcgtgaaaaagtattccgtgatcctgtgcataactacattcgcgtcgagtatcaagtgattctcgatttaattgacacccccgaatttcaacgtcttcggcggattaaacagcttggcacgacttcctctgttttccaaggcgctgaacattcccgcttcacccactcattaggtgtttatgaaatcacacgccaaatctgtgatcaattccaacttaactaccctagtcaagttgccggtgatggactttggaacgatgatgaacggttagtcgccttatgtgcggctttattgcacgacatcggccatggcgcttattcacataccttcgaacacatcttcaatactgatcatgaattgattacgcgccaaattatcaccaacccggagacagccattaatcgcgtcttaacccaagttgcggatgatttccctgcgaaagtcgctagtgtaatcgatcattcttatccgaatccacaagttgtccagatgatttccagccagattgatgctgatcgcatggattacttattacgggatgcttacaatactgggactaaatacggagaattcgatttgacgcgtgttttacgagtcatgcggccttacgataagggcattacctttttagcaaacgggatgcatgccgttgaagattacatcgtcagtcggttccagatgtatcaacaagtttatttccatcctgtttcacgcggcatggaagttgtcttgcaaaagctcttgcaacgtgcgaaagttctttatcaacagcctgaccatcatcagagtctcgcaccgcaattattgattccatttttcgaacagaacttcaccctacaagactatttaaaattagatgatggcgttttgaatacctattttctatactggttagactatccggattcagtgctcaatgatttggccgaccgctttttaagccgccgcccactcaaatcggttgcctttagccaacagacccaacgtgttttaccagaattacgggcgctaaccgagcaagctggttataacagtgagtattacactgctgttaataacagtttcgatttgccgtatgacgcctatgatccctccgctaaatcacccaaaactcagattgaaattatacaatctgatggtcaacttgaagagttatcatcattaagtgacttggtagccgccatctcaggccgttttagcggcgatgaacgcttctatttccctaaagaaatgctcaacgaaaatgatatcgaagtcttcgcaccaatataccgccagttcaaagcatacttgcgtaacggtgcaatcaatcctaaccacttattaccaagtccagttgctgcgcgtgctggcggatcttcgggtggctctggtggttcgggtggtagcggtggtgggtcttcaccgacatccagttatgttggcggccgtagtcgtgattattattacgatgatgcgggatgtcggcattactacaagtccctaatgcgtcgtttattcgatagtatagtcaccctgcctttcgtattcgtctcccttgggatcatgatttggcgtaaagtgcgtgactggttaaccggacgtagaaaacgggcactggctgataccatgccgttagatgctgaaaccgcggcgcgctttgaaaatgcattctatcaaattgaaacagcttggccctcaaatgacttaagcaacgtggcggacttaatgacgccccattttcagcaccaacaacaacgcatcttaaaccgttatcaacggcaccataaacataaccaacttgagagtatcgccattgtttcaactgagttattattacctgaaaaaccgaaccgccaagatattctagtgacagcgcaaatgcgcgattacttcactgatgagcggcagacagccacggttaatgaccaacgtcgtgaagcggcttatattgaacgtttcagcgaaatttgaacgtttaaattaattgatggtcaatatcgtgtcgctcatattaatcaatccctataaaagagctaccagttggtggttcttttttgttatttaattggttaagtttattgcgttaaacaactttttctcttaaaatagaccttatcgatttaaaaattgtttatccattttgattagaaagtgaggtcatttgatgaccctccatgttggcactgaccagacacaaacggccgtttccttaatgccgcgtaacctagacgattgtgtgcgtgaaatggtactcgttgagcaaaagcaagctgcgattgatattctagaatggcgcttagactattggcaaacaccagcgaccttattaacggctggtcaccaaattgccgcctgcaagcaccccgttattttaacgctcagaacaacccatgatggcggcctgtctgatccaaccgactatttagaccgctatacagctctattatcggctcaaatcggcgatgtggttgatattgagtggtctttacctgaggcagttagaaaagccgtcagcgcgcttgcacgtgcgaatggctatcaagtgttactaagccatcatgatttaaagacaacccctgataatctaacacttcaaaaacaactcgcagcaatgcatgcgacgcacccagatatgttaaaactagcaactaccgctcaaagtaatgaggatactactcggttaatggcgattacccagtcttttacacatgatcacacaaccccactgatcacgatggcgatgtctgaatttggcttagcctctcgcatttttggtggtcaattcggttcagctgtgagtttcggttaccttgaacaccccagtgcaccaggccaattacccattgaacaactcaaaggcttgttgacaatgcatcaaaattaaccgcacaaaaaaagccccgcacaaattcaatttgtgcggggctttttagattgttgattagttccgttcaacgtttaaatcattcatcttaagcattgtatcaacggccttttccattgtttcgattgaaacaaattcgtagcgaccgtgcatgttttcagcaccagcaaagatgttaggggttggaatacccatgaatgaaatcttagaaccatctgtcccaccacgaacaggttcgattaatggtttgatatcaacggcttccattgcatctttagcaagatcaacaacgtccatgtgatcttttaagacttctgccatgttgtagtattgatctttgattgttgcaacaacgcggccttcaccgtatttagcattcatttgatcagcaactttagcagcaaatgctttgcgttcttccaaaccatcacgttcgaaatcacgaatgatgtaagccatgtgtgcttcatcaactgtgccttcaaggcttaataagtgatagaaaccttgacgaccgtctgttttttcagggacttcatcgcttggtaaagcattttggaaatcaacagccacttgaagggcattgatcatgatgtttttagcttcactaggatgcacgtttttaccttgaatatcgactttcatggcagcagcgttgaatgtttcgtattcaagttgaccgattggaccgccatccattgtgtaagcaaagtcggttgcgaaatctttggcatcaaagtgatcagcgccagttccgatttcttcatcggggccaaaaccaatcttgatgtcgccatgtttgatttcaggatgttggactaagaagtccatggctgtcatgatttcagcaaccccagacttatcatctgaacctaataatgttgagccgtcagttgtgattaaagtttggcctttataatttttcatatttgggaattctttaggatctaatacgaatttacccgcatcatctaatttaataattgattcgccatcatagttttcgacgatttgtggattgacacctttggcattgaagtcggcagtatcaacgtgtgataaaaagcccattgttggcacttttttatcaatattacttggtaatagcgctgttacatagccattactttcgttgtatttcacatcacttaatccgatttccttcaagtcgtccatcaatttgtgtaaaaataccacttgtgtttgggttgatgggctcgttgttgcgttttcatctgaacgtgtttcagttgtgacatattctagaaaacgaggaatcaatttttcatatttagccatggtgtagcctcctagatattatttaatactaattctattctaacctacttcgcattaaaaataaatgtaaacggatcagttttttgctgtgatttaatgaatgtaaccgaccaaccacgctgtttggcccacttttcaaaaatttctgtcatcttatccttcacaatactttcgacatgatgaccaggatcaattactgacaaaccagctgccaacatatcgtgaccagtatgataatacacatcaccggtaatgtagacatccgcaccagcttgtaaagcggctgggaagaatttacccccatcgccaccgacaacggcgactgtctgaactattttgtccggttcatttgaaattaagcgcagacctgttaaatcaaatgtttcgcagacaaattgcgcataatcccggaccgtcattgattgagcgacttgaccaatgcgcccaataccaatcggttgttgttgattagctaatggaatcacatcataaacgggttcttcataaggatgcgccgcaagcatcgcctgaacaactttggtttgcatggccactggcagaacaacttcgattttaacttcggtaaccgcttctagatcacctgattggccgatataaggatttgctgcgtccgttggttgaaaacgccctattccggtcgtactaaaactgcaggcttgataatcgccaatatgtcccgcatcagcttgattcaatgccatccgcatctgttcagcatgtgactcagggacaaagaccaccaattttactaatgattggtagtccgtgatgttaaacggttgcacatcgtttagttgtaaagcttcagctagccaatcattcatgccgccgttagtcttatccaaattcgtatgggcggcatataccgtgatgtcatgcgttaacagatccgcatacatcttgttttgcggatcacttagatcgagattccgcgctgggcgaaacattactggatggtgggcaaaaataaaatcaacattctgttcaatcgcttcttgaacggtttctgggcggacatcaagggttactaacacccgttcaatgcttttatcgcgtcgcccgatttgaaaaccggtggggtcattgccttcttttaatgccaatggtgcgtagtcttcaatcgcagcaattaagtcactcgcgactaattttcccatgtcttcatctcctcgattaatgcaatttcatgttcaactgctttgactttatcagtaggtacgacttgtgcgttttgtaattgttgcaataaatgacgccgttttttcaacattgtcccccacttcaattggaaatcagcaggttgtgtttggcggagaacagggccaaacactcgatcactttcgcttaatggtgcaactgatggttggggttcgccaacaatcacttcgtagatatgcccgtcttcagcgacaatcgcttcatcaacgattacatagtcatgtgcattcaaccattcacggacagtactttccatgatattgggttgtaacacgagtcgttcatggccgttcagatgatccaatccacgggttaaaatttccgtgatcaataaaccacccatgccggcaatcacgatgcaactcacatggtcttcttcaggattcaatacctcgacgccatcgcctaagcggacttgaatctgttgttgtaagtgccattgattaacgtgagtctgtgttgattcaaacggaccggcaactacttcaccggcaatggcgcccttcaaccggttttgttccgtaagccaaattggtaaatatgcatgatctgaaccgatatcagcaacaatgctatcttgtgggacaaactgcgcaaccgcagctaaacgctttgataaatgaattggtgacaaaaataaaactccattctagaaactttgattgttatagttagtataccaaattttagacggcatacgcagtcaaagtgaacacttgattctggatagcagaagttgctttaggcaaaatttagttttatactgaaattaaatcgaaaacgctttctatacattaaggagtggtctcatgagttggttgcaactattctgtgttttcatgattggtttaggcatttttcaaatttataagtcgtatcagtattatcaagacttaaaattacacgcagatcaaaatacttctgtctttgcgccagcagcgctctgttcgagtgctttcatggggcttgtctttattgggattagtcttgctagtttattgaattggttataaacgtcaattagccccttctttttgagctttattagttttcggaaatcctagttaacataagataaattatttacagtgaagggggtggtaacatgaactggttaccaattattgggattttaatgctaatcatcggtgttttccaactttcaatgaccattaaaacattcaagactttgaaggttgaagcaaaccacagtacttcagtcttcatgcccatggcgttatggtcaggtgcattgatggggattgtatttttagcagtggggattggtgctctgcttgtttagatacacgcaaaaaaggccgcaagctaggttagcttgcggcctttttattgattgcctaaacgtgctttttagttcaacaacttccgcttaatctaacattgccattaattctaaaatctgaattaatgacaatattgtattaatgctcagttgctcccgtaactaaacgcactttatcgaaaacgtgctctagcaggcatatttctgcggctagctacgtcagtcaaacaaccaacatcgttggttattcgcctgactatgctaaccctcaaaatatagccgcctgcttacgcactcttttattctaaaaagtcttttaattgttttgaacgtgatgggtggcggagtttccgtaatgctttggcttcgatttgacgaatccgttctcgcgtaacgccgaacaccttacccacttcttctaatgtccgtgtccgaccatcatcaaggccgaaacgtaaacgtaagacgttttcttcacggtctgttaaggtatctaggacactttctaattgttctttcaacaattcataagaagcatgttcttcaggactggttgcatcttgatcttcgataaaatcgcctaagtgtgaatcgtcctcttcaccaattggggtttcaagggaaacaggttcttgagcgatcttcaagatttcgcgcaccttatccgtattcatatccatttcagcaccaatttcttcaggcgttggttcgcggcccaaatcttgaagtaattgtcgttgaatccggattaacttgttaatcgtttcaaccatgtggacaggaatccgaatggtccgggcttgatcggcaatcgcacgcgtaatcgcttgacgaatccaccatgtggcatatgttgagaatttgaaccctttacggtgatcgaatttttcaacggccttcattaagcccatgttcccttcttgaattaaatccaagaattgcatgccacggccaacataccgtttagcgattgaaaccaccaaacgcaagttagcttcggcaaggcgttgcttggcttcttgatcaccttgttcgattctcaaggctaagtcaacttcttgttgggcgtttaaaagagatacccgcccaatttcttttaagtacatccgcacaggatcgttaatcttaatcccggttggtgcagtcatatcttttaattctttagcagaaaccttttcctttttaagggtagcggcacttggattcccatcttcatcgacaatcccaatcccttggtcttccactttttgcattaattcattgatttcatcagcttgtagcgcaaatggtttcacgatttttgcaacgagttcatcattggtgatttctttctttggtttgtattccttaattaaagccttaaccgcaatatcaaatttcttcgtgtcagcttttttattatcagccattcagaaacctcctaatatcaatttcctaatttcttttgcgaaacaagtctaatgacctccagggttaagcgcgtttcttcgctcgcattccccaatttggtcgcctcttttaaggcaattttcgcttctcttaattgttcctcaacgttattttgcgcaatgacgaacagacagtcgtttaacgcctcttgacttgcctcttctggtaagtcaagcgcatcaatctgaacgactaaggcttgtaagtcatctgggatataacccatgaagtcggccaaggtcgacttaccttcagctaaaaaggcgcgccataactcgtaaatcagttggtacggggtatgcacaaaactaaaatcggcattgttctccaattgcaggcgcatatcgtcattagccatcaacatatgcaacacttcttgctccgcgtgttcaacccgggttagccgttgtggctgacgcgtcgctgttgcccgcggatcaccaatgattggcggtggtccacccacaaatgcgtcatccggttcaggtggcatgtcataatcatactgactagatgccggtgcaagtggttgctgcgttgcccgtttaacgcgcaatgtttgtaactgccgcttcaacgtatcaagggtaatgccgctatcggcttcaatttgcttgaggtaaatctcgatttcaagcggcgaatcaattggcgcaacgacggacaatgcctgttgcacgtaatcaagttgatccttctcgttatccagatttaacccttgcttcaaataccgcagttcaaatgcaatcggtgtttcagcaccattttgcaaggttgtcttaaattgttcagcaccatattggcgaacatattcatccggatcagcgccactgggcaaaaccaccacactcaattcaagcttggtattttgctgcaacatggtaattgcgcgtttcatcgcttcgattccgggacgatcaccatcataacagacaattaattcccgagcctgttgccctaaaattcccaactgctcagtcgttaaactcgtccccattgaagcgacaccgtttgaaacaccggctgaatacgctgcaatcacatccataaacccttcaaacaggtaaactttgcgttcttggtgaatagcagtctttgctaaatcatagttgaacaaaaccttccgcttgttaaaaatcacggtttcaggactgttcaaatatttgggttgatctggttgtttcaccaaaacccggccagaaaaagcaatcacttcaccttgcgcattccgaatcggaaacatcactcggccggaaaaacgatcatgcagcttgccggtctgagtttcaataaataagccggattgacgtagtgtctggtacggaacttctttattctggaagaatgaaagcattaaatcggtttgatccggtaaatagccaatactaaacgtctcaattaattgatccgtcaagccccgttcgtgtaagtaatctaacgctggttggcccgcttcagtactcattaaaatatgcgtaaagagttcattggcctgacgatagagttgcttaaactgcgtcacttcacttgattcttgaacattttgagtgggtcgataagtctccgctaaactgaagccgacaaagtcagcgatttttgtaacagcttctggaaaactaatctgttccagttccatcaagaacttgaagacattcccaccccgtccgcaagagaaacaatgaaaaatctgtttctcttcactaacggagaatgatggggtcttctcatcgtgaaacggacaaatcccaaataggttattgccgctcttcttgagctggacatactgaccaacaacatccactatgttagtttggctccgaacatcatcaatcacgtcattcggaatctttcccgccattggtctcacctcactattcaattcaaattgtactaagactgtaaaagccgcacctcacaatgaaatgcgacttttaaggattatcagcacaaaaatacactatatatcatagcaccatttaggtacagttgcaaataaatatagcaaactatctcattcgttgtcaaggtcctttttcaaaagtcccattaagatgacaacgtgattatattgcaggtcctttgccgcatagactaatgtgacgttgcccagctcaaggtgctcgtgcactaccttttcaaacgccggccaagctggattagctgcaatttcagcaaggtacttttctttaaaaacgggaaacttagctggctcatgaccaaaccacttgcgtaagtcagtcgttggggtaatttctttcgcccaggtctcaatagcggcgcgttcttttgaaatgccgcggggccaaatccgatcgactagaattcggtacccatctgagtctgtcgctgcttcataaacccgtttcatttgtaacatgctattatccccttttgaattgtttatttaacaatcaattcgtttaaatcacctaaggtaagggcgatttgagcgataatcatcaactgtgttaagcgatttcgacgaacagcttcatcttcagccatgaccattgtggcatcaaagtaagcttcgattaatggtcgtagtgtttgtaagatgccgtaattatcagctaatgggttcgtagcaattgtaccacgtaagtcttcgaccgctgtgtgaagtgctttttcagcttcattttcgaataatgcaggatcaaccgttaaatcagttgttgcaaagtcaactttttcagcgagtcgtaacacacgtgtcacggcttcaaccgttgccttgaaatctgcatcatcttgatggtctgaaagcactttggcagcttcgaacatcacgactggatcttgactttgattcttcaagacggcatctacgatatcacgccggactttaggccgcatgccgttaaagcgttggcgaacacgatccgttaagaaatcgctgatcgcgtcagcattggttgaccaatcaaggttgaaatcagcttgttgcttaacaatgtcactcatcgcagcttgataatcggccattgggaagtgccagttttggttttctaagatgcggataatcccataagcttgacgacgcaatgcataaggatcgtttgaaccacttggaatcatgcccactgcaaagaaatcagccatactatcgaacttatcagcgattgctaaaaccgcgccgacctttgttgcagggagtgcaccttcagcactaattggcatgtagtgttcgcgaatcgctgtggcaacggctggtgtttcaccttgtaataaggcatatttttcacccatgaccccttgcaattcggcaaattcaccgaccatgccagtcactaagtcaaatttataaatatcacttgcccgttgcaaatcaactaattctgcttctgataaaccaaatttttggcctaagaattgcgcgattaaaccaacacgggtcatcttttcagccagactaccaatcttgtcgtggaatgacacgttttgtaacttcgcaacgttttgttcaatcgttaccttttgatcttcatggtagaagaaatcggcatcttccaaacgcgctgtgaggactttttcgttcccagcaatgacattttccatgaagtcggtgttcccgttgcgaacaccgatgaaaacaggtaataaatcacccgcttggctgcgtgcgtagaagtaacgttggttatccttcattgaggtaatcaacacttcttctggaatttcaagatacttaggatcgaattgcccataaaaagcagttggccattcaactaagttcgtcacttcttctaacaagtttgcgtctaaatcgacttgccaatcgttttcttgggccattgtttcaatctgagtttgaattaagttttggcgtttagcttcatccgcaattacgaattgtgcttccagcgttgcttcgtaatcagttgcttttgccaatatcacggcttgacctaagaaacggtgcccttgtgttgtgcgaccagtcgtaacgtttaaaatactgaaatcgataatttcatcgtctaataaagcaacaatccagtgaattggacggatatattcgaagtcgtaatcggcccagtgcatccgcgttgggaaggtcatcgccataatcacggcttttagttctggcaaaattgtttcaacaggtttgccgatgattgatttttcaacatagacgtattcaacgccttttagtgctttaaaagtaatgtcgtcggtcgttaaaccttggccgcgaacaaaaccttgcgctgctttactccagttaccttcagcatcaagcgcaattttcttagcggggcctttcgcttcttcgtgaatgtcagcttgcttgtccgctaggtcttcgatcaagacggctaaccggcgtggtgttgcgtaagttttgatggtcccgaatgttaagtgttgttcttctaaaaagtcgcgtacgcgcttttctagttgttggatgctaggcatcacaacgtgggctggcatttcttccaagccaatttctaataagaatggtttagtcattgttaacgacctccgtgtttgattcttgagcatgttttaagagcgggaagccacgtttctcacgttcagcaacgaatgcttgcgcgattgagtgcgccatccggcgaatccgtgacaagtaaccggcccgttctgtaacggaaacggcaccatgggcatccaataggttgaatgtgtggctacatttcaagacatagtcatatgctggatgaacaaggcctaagtcaattaaacgttttgcttctgtttcgtattcatcgaagaatttcaaaagcatgtcttggttactgtcttcaaaagcatattttgaatgttcatattcaggttctttaaaaatatcgccatataacacgccattgccccattcaagttcgaacacgttgtcgacatcttgaatgtatgaagcaagccgttcaacgccatatgtgatttcacttgtcacaggatcgcattgcaaaccaccaacttgttggaagtaggtaaattgagtcacttccatcccgtctaaccaaacttcccaaccaacaccggcacaacccattgatgggttttcccagttatcttcgacgaagcgaatgtcatgttccaaaggatcgatgcctagagcccgtaaactatccaagtaaaattcttggatgtttaatggggctggtttcatgaccacttggaattggtgatgttggaataaacggttggggttttcgccataccgaccatctgctgggcgccgtgaaggttctacgtaagctgcgttccaaggttctggtccaattgcccgtaagaacgtgtatgggctcattgtgccggctcctttttctgtatcgtaagattgcattagcatacagcctttttcagaccaaaaacgctgtaaggttaaaatcatttcttgcacatttaactttttaaccatttcaattcctcttttccgtattttgcgcataaaaaaagcctatgcgactgttaagtcacatagggacgattactcgcggttccaccctacttcagctcaaagcgagctgctgcttcattggtatgactccgaaacgccaatccactcaagtcttgttctagttctcactcacctagaatcactgtctgaccgtcttaagggacccttttcttcaacgtctattaagttgattactattttagtcgtcttttggcgtgctgtcaatttctgacgacactttttttaattgtggtaattgactatcgaaactgtacatcttatcgatgaattgcttactcttgagcgataggccaaccgtgtcttgataaatccggtcgatcatcgtcttaagctccatctgcgttgtctgtttgacgttgaccgattgaatcttgaataaatcaatcactgaaaaaagacgcagataatagatagcccgttgactaccgtggaatcgattaacatccaagtgccagtggcgttgacaaagcagcccgccataactctcagaataatcaaacggcaaatcagaacgcccacaaaccgcacagacttgcagttgtggctgcaccccgaagacttgtaacatctgaatctcgataatgtgcgtaatcatcgccgcgtcaaagccttcatcgattaatgagagtgcctgttcaatcttcggataccaactgccgagcggttcgctatccggaaaaccaacatcgactaagcctaagatataggtcgcataggcatttaaaaacaagtcattgctaatcgattgaaactgactcgccgacttgacattatttaaaaaggataagccatcatcgcgaatgtcgccaccgtactcagcttgggtaaatggcaaaatagccgcactcaagcgaaacttcggtttattcgcaccgcgtaagtaaaacatctttttgccaaagcgatcggtcaaaatcttgaccagcatatctttttctttatagttcttccgatacatcactagaccattaaagtcttcgaatcgatgttccgccattgcttaagcctacaatctctttttattgtaaccaaattcacggaggtattggttattgtcacgccaattcttttgaatcttaacccagagcttcaagttgactttttcgccaagtaaagcttcaatttcgcgacgtgaccgaatcccgatttctttgataatggagcccttttgaccgatgataatccgtttttgaccatcacgttcaacaatgatattcgcttcaatctggagcttaccattgacgcggtctttcatccgttccacaaccacggcaacagaatggggcacttcttcatgcgttaattcaagaattttttcccgaatcaattcaccaacaacgaaatattctgggtgatccgttaattgatcttctgggtagtattgagggccttctgggagtatttgttccaattcttttaacatttcagggacattgttaccttctaatgcagagattgggtaaacccccttgaaatctaattcatgccgatattgttcaatcattggtaataaatcgtctggatgaatcgcgtcaattttgttaacaaccaaataaacgggttttttgacgttcttcaattggtccatgatgtattgatccccaggcccttttttatcaatcccactaatcatgaataaaatggcatcaacttcgttaaacgtcgatagcgctgcttgatccatgtattcatctaattcattatgtggtttatgaatccctggtgtatcaacgaacacgatttgcgcgttgtcatccgtgtagatcccttgaattttattgcgagtcgtttgtgcttttgatgacatgatggcaattttttcaccgatcattcgattcataaaagttgattttccaacatttggtcggccaacaatggccacaaagcctgagcgatatgtttctgacataatagtcccctttttagttaaatatggcgtgtccaaagacaatggcgccaatcaatagcgctaaaattgcgctgattaagacactggctgcactgatatctttaatctgcttagccaatggatggtactggtgatcgactaataagtccacgagatgttccataactgtattccaaaattcagccataaaaacgataaaaatcgcgaaaataatcactaaccaatctaaataatgtaactgacaataaataccgaaagcaatcgcaacgagtgcaaaccaggcatcacgccgtaaattagcctcagttttaaaggcggtccataatccaccgagtgcgtggcgtagtgactgccaaaaatgtttattcttgcccgtttgtggttttttaccgttgtaatccaaattcatcgaggatcttctcctgtaatggaatcatttgtgcttcatcttcactatgaatgtgatcataaccatttaagtgtaagaagccgtgaaccattgtgtaccctaattcacgttcaaatgaatgtccataagtttcagcttgttcagctgctttttctaatgaaacaaacaaatcaccgatattcttgggaatgtcgaatagttcttcaaagttggctggtaatccttcttcttcaggatcttcttcgattgcaaaactgatgacatcagtcgcacggtcagtatcgcggtattccttgttaatttggcgaatgcgttcgttcgtcacaaacgtgacagacatttctgtgtcttcaggtaaatctaattgttgcccggcatattctaaaatatccgtgaccagttttacgtttgcttctgcaactacttttgtttcatcgataatttggatatccattcaagtgttcctactttctcatcttttcaatcgccgcataggcgttaataatcttagcaacaactgggtgccgtaccacatcttctgaactgaactgtacgaaagcaatcttaggaatatcgtgcaaaatatgttcagcttgcaccaagccgctcattgttttcttaggtaagtcaatctggctaatatcgccgttgacaatcatcttcgagttaaacccaagtcgcgttaagaacatcttcatctgagcaggcgttgtattctgggcttcgtccaaaataacgaaagcttcttctagtgttcggccacgcatatacgcaagcggtgcaatctcaatgacaccacgctctaacaaacgttcagtatgttctttacccaaaacggcatacaatgcatcataaatcggtcgtaaataagggtccaccttttcctttagatcacctggtaaaaagcctaaactctcaccagcttcaaccgcaggacgcgttaaaatgatccgttcgactaatccttgtttcaacgccgcaacggccatgacaacggctaagaatgttttccccgttccggcggggccaatcccaaacgtgacatcgttttgacgaatcgcattcacgtattgacgttgaccgaatgtcttcacgcgaatatgctgccctttacgatccttgattaatggctccgtgtaaagttcttggaaaccagcaatcgtgcctttttgggccatcttcgtcgcactcaccacatcactactattgagcttaatgccatgttgtaacagcgccactaagttttctaaaacagaagcggcttggtcaactgctggttgttcgccgcgaatggtaatatgctcgtcaaacgcaatcagttcgacagataagctttcctcgatgatttttaaaaaagtatcgtgtgtgcccattaaagcggccgctaaatttggcgttgccaattgaaataaacgctcatctgtttcagccaacaaagataactccttccagagtgtgactgcaactgattctgagtattatctagcccagcaaataaacgactttagtcgattattaactacacgtcgtaaagtgaagaatcaagttgcaaccgcacgtttcaacttcatttgttttagaatgaaaactaccatcattctatcacaaacaacaaccgttttaaaagtagccagccgcgctaattcacgaatttatggtcaattatcaaaatctgaattaacgaccataaaaaaaagcgggactccccagaggaagtcccgcctaaaattaacttaattttgatttaacgacttgattgaccatagcgccatcagctcgtcctttgaccttaggcatgacatattgcatcaccttgccaaagtcagccttacttgtcgcaccagtagcctgcattgcttcgtcaacaatggtgaccactgctgcttcatctagctgctctggtaaataagcttgtacgatttcaatttctgcttttgtttgttcagcgagatctgcacgatcgcccttttcaaactcagctaatgaatccttacgttgcttaagttgtgatgatagtacacttaattcttcgtcagaagataagtcttgccccgcactaattttggcgttagttaaagcggtctttaaactccgaataacagctaatcgcaacttatctttggccttcatcgccgttttcaaatcagaacttagttgttcaagtaaactcattcaatcatttcctttatctaagaaattagaacttcttacgttttcttgcagcttctgatttcaacttacgttttacacttggtttctcgtaaaattcacgtttacgatattcttgtattgtaccagcttttgatacggaacgcttgaagcgacgaagagcatcatctagagattcgttactgcgaacgactgtcttgcccatatgatatccctcccctcgcgtgctaagtataaccgtttacgttcgttaaaaatttaacttcacgtgaaccgttctttgctattatagcgaatgttgaaaatacggtcaataacccacagggaattaattgaatattttttcaaatctagcgattttttcgataattatggtatgatagcgctataaaagtgaataaaggagcatgccttatgccagaatctaaaccattaaccgtttttgtgctttcggactcagtcggccaaaccgccctccaattagcacaagcagcgctcgcccaatttccggacgttaaacctgatctcgtccgcttccccttcgttcacacgcaagagaaactcatggacgtcttaagcaaagcggttcctgaagaaacaattgtggtccatacattagccactaacggtctttctgaaatcgccgaaacctattgccaagcgaaaaaaattgccagtttcgacatgatgtcaccaatgacacaaatgattactgctaaaaccaacagcacgccaactggtgaagctggggcactacatcatttgaacgatcgttattttgatcgcatttcagcgatggaatttgctgttatgtacgatgatggtaaagacccccacggtttcttagaagcagatatcgtgttgctcggtgtttctagaacgtctaagacgccgctgtcgctctttttagccaatcggaatatcaaggttgccaacttaccaatcgtgccacaagcgcacattccagacgaaatctggcgggttgatcctaagaaaattatcggcctgatgaatacaccagaagtcctcaataacattcgccgggaacggatgattgcttatgggttaaatcctgataccacttattcagacatggacgaaattaaagctgaattggctttcgcccaagacctgtatgataagattggttgccaagtgattaatgttgccaaccgttcgatcgaagaaactgccacaattattcttgaacgcatgggcctcgattttgcgggcagtgcgaacgatcacgtcaattaaaaaaagcgttcaaatctgaaatcgatttgaacgcttttttaatttgttaatgtttaatcgttaaaaaactcgcaaccgaactacgctgcgaatgaaacgcattaatcatcccttcactacggtaccccatggcaatcccaccaatcaacagttcattttccggaatacccattgctttgcggaccgcatctggatacttggccgtttcataggcaggaattgtatcaatttgttcgttagccgcggctaacagaatcgactgactaaaagcccccatgtcataaatcatccatggcgaaactttgcgctcaaccgtcaagtaagtcacggcgggcgcgttgaacagatggcgttgtaaatcgctaaaattcgctaacccgtcttcgccaagataggcactgatttcatcattccacacgcgactgttctcagccattaacggtccccagtctgtccggtgaatcacgtttaaatcagagtagcctttcatccggtttcccgttcgttctaaatgatcggctaacgtttcacccgtcgctacatagactttccaaggttgtgaattcgtccacgacggtgttcgttgggcggacaccattattttttcgattaattcatccgagatcggtttgtttgggtcaaatgcccgaattgccttgcggtgattaaccacatcgttaaactccatgtgctttcctcctccaactaacacttatttagcgcgttaattacattttaataacgctcataataccagtgtgttggcgtttcacctaatcatttgattggactagaaagtcccaccaccggaaccgccaccgaaaccgcctgatgagccgcctgaaaagccgccagaaccaccactaacacttgttggattagcagcactgaccgcactgccaacactactattgagagctgttgtaaaggattgaccgatgttcaaccccccagtatacccgtagtaataataataacccagaggcattgtttgaagttgttccggcgtcaatcgaatcttcaaagctttaacgaccttatcagcaatcccgaaggccgttgcataactcaaatatcgatcccacaatagtacatctgggacattcgccatatcgagtgtcgaaatatcctttagcatttgtttaaagccttgccattcgccccgtttttcgtaacccaattgcgtccatagttgcaaattaaatctacgccagacggttaaaatgaagacaagccccatcggaatgagcgtccaccaagcaactaagccaatcaaagcaccaaaaatcaaaattaaaaatagggcgccaaggccgattaaccaataattcaaactggtcattaactcagcgatgtgttctcgtaaccacccgctacgacttgcttcagtcgccactgctgtttgccacccatggtaatgttgattgaacagttttgcactatgccgttttggatatttctcaatctcaaatagactgacatgctgcccatcaccaaccacatcaaatagccagctaactaacttcttttctgaatgtgataactgattgcgattgacgagcgttaatgaaaattgcggcatttttttatggaatagttccttctttggttcctgaacatcaattgttagattctttcgagcaactaagtctagaatcgttgcggataagctctccgcccctgctgtctccgtaattggtaatgccaacaactgacgcacaaccgcaggcccattttcatctggcaaatcatagacgtgttctggtgcctgtccagtataagtcatcacaggaagcgtttttcgaattttacgtaaaattaacaagaacatgccgggcgctaagaccactgctcctatagataaaagccaataacggcgtttttgtgctttgcgttcttgattagcttgttgcgccaaacgtgcttcttgtttgataatggctgcccgacgtgattgatcaatctgattcggattcgccgcagtcaccgccgttggaaaaataatatggctttcgacaaattggtttgctggattattagcgagtttaattgttacccggcctttatcgggttcaacgacttgttgcccatctaaattgccgtgcgtccatgatttgaggtctgcttttttgaatgtggtaggtaattgtattaccacttgaacgttttgtaagtcactatcccacgcatcgccaatcactttccaattcaattccgccgtatcacgataattaataatcagattttgtaactgatatttcaaagtaaccgctaattgattgccatcttgtgcagtttggtatagtttgaaccgataattttgttgtgtatcagttaagctataggtgccttcagtacctgattcactttgactaaacggatgaccattaactgcgacttgcgggttaaccaacttctttggttgaccaacgtttgtttggagattctggttgatatagaccccatggatatcatcttggatatcaaacaccgttttttgttcgacctgagcactcccatcaggttgtacatcaacgtttacctgataacgactgatgtcataggtatcggcagcctggactggctggctaaaaataaaggtccaaaacgccgctattaagataaaaataccaaacttagttcgttttaaattcatagtttgccttcgttctgctcaaccttcgttaataaatcagggtcgaattgccccgctttgagcatcgcaatttcatacgcatatggtgcaaagttatgcttcttatcttcgccaacatatggggtttctagaattttaggcacattaacgagttgttcatgctgtaagacatggtttagcgcatcaaatccgatttcaccaaaaccaatattggcatgacgatctttgtgtgcgccttgtgggttcttagaatcgtttaaatgaacaacttttaagcggtccaaaccgataatgtgatcgaattcattcaaaacgccatcaaaatcttcacgcacattatatccggcatcatttgtatgacaagtatcaaacgtcactgataacttttcattgtaagtcacgccatcgatcatctgtgcaagttcttcaaatgaccgcccgacttcggttcctttacctgccatggtttctaaggcaatttgggcggtttgatcaggtcgtaaaatttcgtttaatcctttgataatttgttgaataccagcatctgcacccgccccaacgtgtgcacctggatgcaagacgatttgagtggcccctaatgcttcagcgcgtaacacttcttcttgtaaaaaagagaccgcaaacttgaagttctcaggcttcactgtattccctaaattaacgatgtatggtgcatgaacaacaattggacctaagttgtgagcttcaatatagggttttgctgcttcaatatttaattcttcgattggtttgcggcgcgtattttgtggcgcgccggtatatatcatgaaggcatttgcaccaaaatcaactgcactctccgctgaccctagtaacatctgcttgcccttcatactaacgtgactccctaataacattccactacctccatgcattttgattacctagattgtcacagaaagcgcaacaaaaagcaagacgaaacctaacccataaaaaaagcccgccattcaattgaatggcgggttatcttatttaatcttaggttcatagaaatgcccgagaattttgacagcttccgtcatgctgacgaatgcgtggtcatccgcttgtttcatgaccatttctaaatcatgcatttcaaagcgagaaataacggtaaataacatcgtcttttcttcacggttatatgccccttctacgtcgtggacaatcgtaatcccacgccgcatttcgtcttgaatcatttgaatcacaacttggggcttatcggtaataatcatcacttgcagtttttgttggcgcgtataaaccatatcgatgactttgccgttgacaaaaatactcaagatactatagagcgcatgttcccaaccaaagagaaacccagcggcaaaaacgagcgccacattaaacatgatattgattgaaccgactgaacggccggtttttttgcgcagtacaatcccaatgatatctaagccaccagtggaaatatcgtttttcaaggccatcccggtcccaaaaccgttaattaccgccccaaaaatcgcacagataatcggattagccgttagctgtgtaaagggcataatctgtaccataacacttgaaaaaacaactgcaataaacgtataaatggtgaaatggtggccaattttgaaccacgcaagaataaataatggcacatttaacacgaataacatcaatgacgttgataatggaaatggtagaaacggcataaatttcgacgtcactgtatgaatgaattgcgcgaacccggtaaccccagaggcgtaaatgccaccttcttcccagaaaaagttcaatgcaatcgacacacaaattccgtataaaatggctgccgaaatcttcgccatattttgatgtttccgagctaaatcgtccacttgaatatcacacctattcacttttgatgtctttcattctagcataccatttgtgaatactaaaggatttcttggaattaatgcacccaattttcacgaatgaaagcacggcgtgtcccctcgaccaattctgctctaaatggttcttttttatagaaatcttggtgatattcttcggctggatagaacggtttggcagcctcaatttgcgtgacaatcggttcgttgaagcgaccactatcgattaatgcttgtttggaagcttccgcgattgcacgttgctcaggcgagttaacgaaaatcaccggccggtaactatcgccacgatcttggaactgccccatggcatcggttggatctgtttggcgccaataaatttcaactaattccgcataagaaataatcgcgggatcaaatgtaatttcaactgcttcagtgtgccccgtcgtatgcgagcaaacttcctcataagttggattaggaacatgcccaccggtataaccagaaacaaccttgataatccccggttgctgatcaaacggatgaaccatgcaccaaaaacacccaccggcaaaaattgctgtatcagttgccattattgtgccccctcttcaaataagcttagatattgaccgtaaccttcattttcgagttgctcgactggaataaattttaaagctgctgagttgatgcaatagcgtaatccaccagcttcttgcggtccatcattaaaaacgtgccctaaatgcgaattagcttcttcactacggacttcaacgcgttccatcccataagattggtcccggcgttccgtcaaaggcgcaattggctttgtaaatgagggccaaccacagcctgcatcatatttatctaacgaactaaataatggttcatgactgacaacatccacgtagatgccttgttcatcaaaatcatcatactcgccggtaaatggggcctccgtcgcattttgttgggttaccgcatattgttccgtcgttaaccgttgttctaaatcatctgtcatatccatcactccttcgtgtttattattataagcagatacaaacagatagcgacaaatatgctcagagtgttctgacagtctgggatttcctgaggattaaagtgaattgactgccatcaaataaaaaagatgcctcaaatttacttttgaggcatcttatatgcgttaattttgatttaactgttgttgcactgctttaaagtcagcatagacttcagcaagtggtaccgtaatttcaacaccactaatcatgtctttaacatgtgctgtttgatcagctaattctgattcaccgattgtaatcaccatttgggcgtttaacttattagctgttttaaattgcgcttttggtttacgatcaagatagtctcgatcagcggttaaacctgtatcacgaatcttttcaacgatttggagagttgtcgcacttgtttcagcgccaattccaacgacatacacatcgagtttagattctggaaccaacgcttcgttttgcgcattcatcaataataataatcgttcaacgcctaagccaaaaccaacccctggcatgtccgggccaccaagttgttcaactaacccattataacggccaccggctaagacggttgtgtagccgcgaccaagcaccttattatttgtcataatttcaaaaattgtgtgattgtaataatcgagtccgcgcaccatttcagtatccacttcatatggaatgtgcaatgtttcaagtaagtgcttaaccgtttcaaagtgcgccgttgcttctggtgttaagtaatccaaaataacaggtgcatccttcacaatttcttggtccttagcatctttactatctaagacgcgcaatgggttcttgtgtagacgaactttagaatcgtcacttaattcatcaaaatgtggttcaagatagctgacaagggcttcatgataagccgcgcgactttccgcatcccctaaggtattgatggccagttttaaatccgtaatatggcattcacgtaataaacgcatcgccatgctaatgacttcaatatcgaccgctggattctcagaaccaaatgcttcgaccccaatttgatggaactggcgttgccggcctgattgtggccgttcataacggaacattggtcccatgtaatacaccttataaggtttttgatgttctggcccataaagtttattttctacgaacgcccgtacaactccagctgtgccctctggacgcagcgcgatatgccgatcccctttatccatgaaatcatacatttctttgctgacaatatcagatgtatcgcctgaactccgtgaaaagacatcatagctttcaaataatggtgttctaatttcgttgaattgatagcgggcaaaaacgtcgcgtgccgttttctccactaattgccactggtttgaatctccaggtaaaatatccgcagttccttttggcttttgatagcccatgatcattcctccaaatggataccaaataaaaaaacacccctgtcgttgaacaagggtgcttaaatgcacggtaccaccttaattttagcttaattatataacgttgttgccaacggtgtgcgaccacacagacctcaaaagcagtctcggcgtgccattgatttcttgcagctgtgaaatcatctctgtcgtagggggcttagcctttactttatcactggtcatcacttattcttattgttataagattaacgttatttcaaaaaaaagtcaatcaatcttgaattttttgtaactttttcgctgaaactctttagaaagttgagttttttgctataattaaccttataaattaataaaacataacaaaggtgttgaaaaaaatgcagaaacctttgagctggtttaaacactatccggccgttattatattagcattactcgtttttgtcggtctctttgtgacccacgcgctggctgcttaccaacaaattacgattaaagcgaacgtcgtaaacgttcgccaaggccctggattatcttatgatgtcatgagtcaagccaataaaggcgaaacaatgaatgttatctcacaaaagaataattggtaccaagtgcgcttaagtggtgataagattggctgggttgctagctggttagtcgataacaccgaagtcagtgccacttcaaaccgagtcgctaaggtcaccaacagttttgccaatgtccgccaaagcagtagtgccgatagtcaactactcggtaagttaaatcaaggtgacgaaattacagtcttataccaacaaaacggttggagccagattaaatacaactcagcagttggttgggtacaaagtgatttaatcgaagtttccgaccaagctccggcgactgttcaaaaaacgacaaccgctgaatctgagtctacggatactgatacaagtagctccgcgattaaatcagtgaccacccaactggataataccaagctacgcactggtcctgatgtttcgtatcaatatacccaaagctacccagccaataccaagctaacttatatcaataagagtggtacttggtatcaagttaaagatgccgatggtaataccggttacgtcgcaagttgggttgtcactccttctgagaagaatgaagttgttaagactagcgctacttccctttctgaagccaccattgttttagatgctggtcatggtggcaccgacgtcggtgcactttcaactaagtctaagtatgaaaaagactacacattagcgaccgtcgatgcgattgctaaaaaattaaaagcggctggtgctaacgtcgtgctaacgcgttcaaatgatagttttgtcgatctcgaaccgcgacctgctcttgccaataaattaaaggctgatgcctttatcagcgttcattttgattcaagcaatgaagccaatgaagcatccgggacaacaacctactactattcaagcagtaaggatatgagcctcgcgaaggccatcaacaatcagactaagacattaccgcttaacaatcgcggcattgaatacggcaattatcaagtccttcgcgataatcaacggcctgctgttctcttagaactcggctacatcaattctgataaagactttagttatattagcagtgctaattaccaagctaaagtcgctgatgccgtttataccggcttaaccgactatttcaaataactaaaaaagaaccgtcagattaaatctgacggttcttttttacataattggggcaaacaaacgcgccaagtcctgtgaccaacgttcttgattgctttgctcttgtatccgttgtttcgtaaatggtaagcattcttttaaatcagccgtaaaagattgttcaagttcagttgcgagttgtgcatcatataaaaaagcggtcgtttcaaaattcaatctaaaactgcgaatatctaaattagccgtcccaaccgctgctagttgcccatcaactaacattacgcgtgatttaaatccggttgattcagagaagtaaatctgaccgcccgccttcacgatttgtctagcgtaatacaaactcgcatgatgaatcattttatgttttgcacgtttggccatcatgatcttcacagtcaccccagaattaatggctaacactaacgccgccaatacagaatcatccggaataaaatatggggtctgaatccacagccgttttttagcggcagcaatcatcttcaaaaagcctaacttaatctcatcgagttctcgatcaggtccacttgataccagttgcatgctagtctgcccgtgttcatctgagttaggaaaatattgcggactgtaatacaccttttcctgacgcgtagccgcattccagtccatgaaaaagcgagcttgaaacgataacacaccatcgccggtaatccgaatccgcgtatctcgtgcaggaatattaacgtgatgattattctggttaaaatcgccaaggtaggcggtattgccatcaattactgccaattgccggtggttacgaaagttaaagcgtagattaacgaaccggaaccgagaactaaaaaacgggacaacttggccgccggctgcttccaatggcttaaagaactgccgggataaatgttgcgacccaaatgcatcatacatcacacgcacttttaccccccgcagtgccttgtaagccaatagattgaccagttgacgcccgtgttcgttgtcataaaaagcatagtattcaagatggatatgatcttgcgcccgattgacatccgttaacaactgttgatacgccgccttcaaatccgttaaaattgttacattgttttcctgggtcacaaccgcggtatttgatactaagaagaggttgattaagctctgcgtttctggcggtaacgtgtgttgcttctgcgcttggcgtaacgctgctttttgggaggtcaccaaggcatcaatgccgagccgttcttgtgttttcaaatcgaccatatgatcttccggtaatttttttccgaaaaatagatacaaaacaaagccgataattggtaagaaaatcaataccaagagccaggcccaggttgctgcaatatcacgttgttggcgaaatacggtgataacagccccgattgtatttgcaatccaaatcagtgctatcccccagataatgattgctgtcattcttcattcatcctattctttaaaccactttgcttttaatttggctagcgtaccatttgcttgtaagacccgataacgtcggttgataaattgacgtaattgttgatcttgcggacgcatcccaacagcaaactgttctgctgcaaaaggactgtcgatggcttgaaaatcgctgccgttgtggcgtgacttaatttcaaattgcgcgtagacttcatcaattaagagccccttaatccgatcggcctgtaagtcgataaacgcattgttataagtatcatataggattggtgcatggttggcaattctttgctgtaatcgtttaggataacgctctagttgttccatcccagatgagcccgtttgaacgcctaatggttggttggttaaatcagccatttgattaacagggtgtttcttgagcgacacaatcatttgccgattagtcagatacgggtcactaaacgcaacccgttttgcccgttgcgccgttttagaataaccactccaaattaaatcaatcgtttgattattcaattccgtttctttcatatcccaatcaatcgactgaaagtcaacccgaatgccactccccttaaaaatcgcccgtgccaaatcaacatcaaaaccggttaattgaccattcttctcacggtaagtcattggcacaaaactatcatcaatcccgacgactattttttggcgtttttgaatcgttgcccattgatcagcctgctgattgcgttgtgcgcaccctgctaaaccaatcatgctcatcaataaagccgctattaatgctgtttttttaagcttcatcattttgttgaaccccgtttggttgtaattcaaagatttgatcagcaatctggttggcaaattgaatatcatgggtgacaacaatttgtgtcattccctgctgtttcaaatctaaaatgagttgtgcgacacttgccactaacgatggatcaagtgcgctggttggttcgtcataacagagaatctccggttgcatcgccaatgcgcgggcaattgcgactcgttgacgttgaccgcctgatagttggaacggataagccgtcgcctgagcacttaaccctagttgctgtaataattttgcgccatctgctttagcctttttagcgggttgttttttgaccatgatgggtgccagcgtcacattctcaaggacagaaagatgtgggaataaccgaaaatcttggaagacaacgccaatgcgcgccccttgttcccgattactaggttcgtaaggtttaccatcaataataaaccgtccgctatcgggttgatcaagcccactcattaaccgtaataaagttgatttgccagcaccacttggaccgacaatcgctaaaatactccctgattcaactgataaatttaagtcgttcaaaatttgccgacctttgaaggattgattgatattttctaattgaaacatgttgccgcctccttagcgataataacgataatagcgttccaaacgccgtaatgcccatgtacaaatggctgttaacaataaataaataatcccgactagcaaaagtggtaagagattgacatcacgcgcacttgcgacattgccagcccgcagtaaatccccaatgccgataacatacactaacgatgaatctttaatcaagttgatcacttcgttaccgacagacggtaagacaattttaaccgtttggggcacgataattttagcgattgtttgtgggtaagttaagcctaagacctcagctgcttcgatctgaccattatcaacggcttgaaagccgccccggaaaatttcggcaaaatacgcagcataattcaaaataaaagcgattaaagcagcatcgaaccggttaaaaacaattccgaccacgggtaaaccataaaatacaaaaattagttgtaataataacggtgtcccacgcatcagccacacatataaatctaaaagataatgcagtggtttaaacttagctaataaccctaaacttaataataaaccaagtggaatcgcgccaataatcgttaggccaaaaacagccaacgtcatctgcgccccacttaataatgctggtaaaatcgataaactatagtcaatcatgacagactcctctcatttgtccaaaataaaaagccctctttgcgtttaaaacacaaagagggctaaatttcgcggtgccacctcaaatttttgtttgcctcacaacaaacaactcagttagttttagaccaataaaaaaagtcccctggatttctccaagaggacgaatttatcgcggtgccacctcagtttaataaactgctcacgcagcttaaacttatgtagtttctaaaactacagcgataacgggctaacggatcatctttattcgatgatcaaactcacggttgtgccattaatctcaagggccgacttccaccacgcatcagctctctgaacctcaagaattaatttggaccgttcaacgtttaatgtattgttattcattctattcaatatcgcatcaaaagtcaatggttaatgtttattgcttaccgaaaagacgggcccagaaaccaaccttgtgttgtttcaaagtcatcaatggaactgtttcgcctagtaaacgacgggcaatattccgatagccttggcttgctgggtttttcggatccatcacaattggttcgccggcattggacgtcttgataaccgcatcatcatcaaaaataatgcctaacaatgaaattgaaagatgtttggtaatttcatcaacatccatcgtttcgccttcattcatcatatgacgccgaatccggttaattactaagcgtggcgcaatccgcatttcttcttcttctagcaagccgacaacgcggtcagcatcactaacagaagaaatttcgggagttgcaaccacaattgcaccgtctgcaccggcaatcgcatttttaaagccagattcaatcccagcaggacaatcaagaatcacaaaatcgaattcttcttttaattcattcacgatggcggtgacttcatcaggcgttaacgcttctttatccgcattttgagcggctggcaataagtaaattttttcatcaaaacgtttatctttaatcagtgcttggtgcaacttagcacggccttgggcgacatccacgatatcataaataatgcggttgctcaatcctaagacaacatctaaattacgcagaccaatgtctaaatctaacaagcaaaccttcttatctaaaagcgcaagcgccgtcccaatattggcgcttgatgttgttttaccaacgccgcctttaccggatgtaataaccaaagctgttcccatttttattgctccttcattttacgatataattttggattaatctgtttcaaatccgttaactcaccgtagtcgataacatgtaaatcattgatgaaacttacactctgtgccgtaaatggcgtcttctggtgatcgagaatctcaactgcgtctgctatccgcaattgtaacgcgtgtgataaatcacctgcaacaactgcttctgcattatctggaaacccagcgtgcacaatcccggcaacttcaccaagtacgaagatactgcccgttgcttttaacattgcgccttggtgtaaattaccgacgaataagacatcgccaacataattgacctcttggccgcttcgtaaaacattgggttcaacgtgaatactattttcccgccgatcaatctcagcctgttcaatcgtcatgacttccgattgaatgcttgtcccattaaattctggaaactgctcaaagacggtcgccagtgcttgcttttgcgcatcattcaacaagcgtctaccagtggtcagctccagttcaatctgatcgctccccaactgcggttgctctaagcgaatcttattcaataattccgctagtgcaactaatgcttgatcgaaatccgcacccgcatcaatgtttaattcaaaaccttctttgcgtcctcgcaacgtgactgcatccatagaaaaatcaaaccccttaccgttctgattttaattttagcaataaatattttaaaggcaaatacaaaaagacaaaataaaccaaatttaatgcaattgtcggtgctaaaacattactaataaattcgactggtgttactgttgcataaccaatcaagcgattcatgatgtaaatcgtactctcgagtaatgttaaacacaagacatcgattagcccaatgaaaaaggctgagtcaggtaaatattgttttaaataacgcactgtatagataatgagcggcactgcaaaagtgtacatcccgatcatccccgtataatacaaatcgtataaaagaccaatccctgctgcataccacgtaagttggcgttcctctggtaaaacaaaggccgttaccactaacacgagcataaatagccggctaatcaacgtatgatctggtgtatataaccattgttcacataaatgactgatggcgccatccaaataaaacgcaacgagtaagtagattggtaataaatagcgccgttgtaatcgcgtcacacccatgctactcaccttcaatcgttcgtttgatgacagtcacaacggttaaattgtttaaatcagcagctggggtcacataaacagttaatgctaacccaaaatcgtctttcttaactgctgctaccttaccaaggtacaagcctttaggggttaatccacctaaaccagacgtgatcactttgtcacctttttcgattgccgcatcggtcttaatctgcccgagcttcaattgtttccggtcagcattgtaaccggacatgatcccattaacttgcttaccatctttggtattcaccacagcagcaaatccgttactactttgatccgtacttgaaacgagttcaaccttcgaattagtcttgttgacttcaacaatccgtccaataatcccagactcagacatgacgggcatatcttttttaagtccagctaaggcccctttattgataaccaatgcattttgccaattatcaggattccgggataaaacagacgcattaacggttgtataatccgtcaaggtgccttttaagccgagttcctttttcaaacttgcattttcttctttgagggtttgggtttgaaccttggtttgagctaaatcatcaagttgtgctttaagttctttgttttcctggtacgtattaatcaagtctgttaaggcatctacccctcgaccaatcccattggccggcacgctaatgacttggttagtgatgcccgttacgtcgttgccaaattggcgtacgaaactcggactctttttgttattgcgtaaaccaactgacattgcgatgaagcccatgcagacgattagcatgattaataacacaattaacttcttatttgaaaaaaacttttgcatggtttcttcgccaccatccatccttaatatcgtaaaggtgggacaaaaaccggtgatcagtagtccttcctatagcaatcgattcacaacccgaatctgtcactaatttaggcgctacgtcaacgctgaccgcttcttgtcccacttctactgaacgattaatttttcttcataacatcgatattctttaatgattcgccagttccgactgcaacacagtctaaaggatcttgagcgataaagactggcactttagtagcatctgaaatcacttctggtaagtgtttcaacaatgcgccgccaccagttaagacaatcccgtgatcaatcacgtcggctgcaatttctggtgatgtttcttcaagtgtttctttgatggcttcgataatggctgtgacaacttctttgatggcttcagcaatatcaacagcttgaatgtccactgtcttaggtagcccagttactaaatcgcgaccacgaatgctcatcgcttcaatttccttagcgcgttctggtgatgctgaagcgatttggaatttgatttgttcggctgttctttcaccaatcaacaagttattgttttgacggatgtaagaaatgatcgcgtcatctaacttgtcgccagccattcgaattgaacggcttgaaacaatcccacctaatgagattgtggcaacgtctgttgtcccgccaccgatatcaacgaccatgctaccagttggatccatcacaggaagaccggcaccaattgcagctgcaaatggttcttcaatgacgtatgcatcacgagcgcctgccaccttagttgcatcgattacagcacgtttttcaacttcagtcacaccacttggtacgcagaccattacaaatggcttgctagatgagcgacctaatgatttttcgataaaatatttaagcatggcagcagttgtatcgtaatctgcgatcacgccatctttcattgggcgaattgccacaatactaccaggtgtccggccgatcatgtcgcgggcttctgagccaacagcaatcacgtcaccagtttgtgtatttttagcgacaacagagggttctctcaagacaatgtctttaccgtccatgtatacgagtgtgtttgcggtacctaagtcaataccgatatttctagtccctaatccgaacactatttttctctccttcagttaccaaacgtttttatagtcattggcattatatcataattttacgtaataaaaaacgcaatgtaactactatgttaacggattttcagaaaatttgacaggtctcgcctaaaattaacagattcttaaagaaaaaagcgttctcttttactccactaagtaaccctcttctcgcaaactgagatactgctggcttccaataatcaagtggtctaggcatacaatgcccatcagttcaccacaggcgacaattcgtttagtgaaggcaatatcttgcgttgacggcgtcaactggccgcttggatgattatgcaccaaaataaattttgctgcagaataacggaccgctaatttaaagacttcccgcggatgcgcaactgaactatcgagtgtgccaatataaatctgtttcatctgaataatttgatttttaacgtctaaaaaaacagctagcagttgttcttgcgtttcgcccgctagtgtttcaatcatgcgacggccaaccatttggctcgatgcgaccacaccaaaccggagagttcgttgcgtttgcaatcggtgactcaattcacagatggcttggatttcaatcgctttgactggtccaattcctgccagtgtttccaactgcgttaaacttgcttgttctaaatcccgaaagtcaggataatgcgctagcaatttgcgcgccacctcaccaacagataggtgactattaccagaacgcaaaatgacgattgccaattgctcgttcgataaacttgctgcgccgtactgcattaattgttctcttggttgtaattgtcctgtattccccgccattgtttgcctcccacaaaaaaagacgcatgacgcgtcttcttggtttaactaacaatacgttaattaacgggcttatttttctaaatacggaatcacttgagccaaatccccaacggtcgcaagtgtttgctgattggttatcgcagttggtgcaattaaatcagggaccataatcaccggaatggcagctttactagcggccatcacaccattaggtgagtcttctaatactagggcactaggcgctggtaaggctaatctatccaacgcttttaaaaagatttcggggttcggtttgccgtgagtcacttcgtctcccgcaacaatttgactaaaccgtgattgtaggccagtactttgcataaagtcatcgaccatgctgcggaaattgctcgatgcaatcacccgactaatcccctgattatcacagtaatctagtaaatcgactaaccctggcttaattgcaacaccatctgcttcaacaaccgttgctacgttatggtatgaacgatcaataaattctgttgcggccgttgccgaaccaagctttgctttaaaataattgcgtaaatacgtatcagtggtccctaagatggcatggtgatcttcaggtgtaaaatcaaagcccatttctttagcggcccgaatattggcttggtaataaatcttctccgaatcaaccaatagaccgtccatatcaaaaataattcctctagttgtcattgactattctcctttaaaatattggcgaatcgtactaattaaatatagcgaacccgttacgagtaatacatcatcagccgacacatccgctaataattcggttaatgcaaccggccagtccggttcaaatgtaatcgtctcatcaactgctgcatattgggccgctgttgccgcgcgtggattatcaggaaccgtagtcagcaccatccgcgtcgctatttttttgagctgtggtaacatctcatccagatttttatcaccaagcgctccgaataacaggtaaatgtcacgatttttaaattgatgccgcgttgtctgaaccaattgcgccaccccttccggattatgtgcaccatccaagataattaacggctcatcgttgattttttcgaagcgcccaggccagttaacccgttttaaagcacgcttgatgtctcgaacctctagtttttgttgcgtcaactgtaagtaacaccaaaatacttgtaatgcaaccgcggcgttttcaatttgataatcccccatcagcggaatctgtaattgtcgatacgttaccgcgtcattttggaaagttaactgttgcccccaagtaggtaacgttttgaccgcagcactcgaaaaatcacagccactaatggctaacgaactattcaaacgagttgccgtttcctcaaccaccgtcagtgcttcttttggtaattgaccaatcacgactggatgaccagccttaatgatcccggctttttgagtcgcaatttctgcaaatgtcttgcctaatagagcctgatgatcaagaccaatcgacgtaataactgatatcagcggcgtcaacacattagtcgagtcatacaaaccgccaattccgacttccacaacggcgacatcaacctgctgttgtttgaaatatagaaacatcattgctgtgatccattcaaactcggtcacttcaaattcggggtcagttgtttgaatctgggcaaccgttgtctgaatttgttgcgtaacagttactaaatcggcatcactgattggttcctgattgataacaattcgctcgttgaaccgcataataaacggcgatgtgtaacgaccgacttttaaacctaactcttcaatcaaacaactgaccattttgacaacggatcccttgccattagtgccagtcacatgaatgaattgttggttttcttgcggattaccgagacctgccaacaattgcgtcattcggttcaggttcgcttctttatgtaatctggggcgcgaatgaatatacgccaaagctgtttcgtaatctgtcactaacatcgccaatctcctttaacaaactgtctctattttagcatagattgcacgcgaatcgatgcttaaaaactggcgcacacaaaaagaccacctcagtttttaaggtggccttaacgtgcttttggttgcaacaacttccgcttaatctaaaaattccgttaatcctaaaacctgaattaacggaatttttgtattgatgctcagttgctacccgcaaccaatcacacttctttcactaacgtgctcctcgagcagccttttccggttaactgcaaaatgggcatcatggcaaaaaacgccacaatgcccattttactgttaatcctcaaagcctaaccagctcgagtcgcacttcttttttaacgtgttttcatcaacagcttcttgtgctttgctacacttatcaaatcggcgcttacagcgccaattcgctaagttaggcaaatgctcagaagctaaccgttgatgatgcacttatgcattttttaattctgctactcgtttttcgactgattggtattgttgttcgtagtctgcttgtttgtcgcgttcttcttggaccactttttctggtgcgcggtctgtgaagcccttgtttgacaacttgcctttagcacgtttgatttcaccgtctaaacgtttcaattcgccttctaaacgggcgatttcttcgtctaagtcgagcaattcagccaatggcacataaacttctgcaccactgataatggctgtcttcgccaatgctggtgctgttaaaccttcagcaatttcaagtgacttaggatgtacgaagcgttcgatgaagtcttggttttgtttgaagatcgtcattaatggcgcatcttgaatgttgaccaagacatcaattggcttgcttagtggtgcattggcttcggaacggatattccggacacttctaattagatcgattaacgcattcatttgcgttgttgcttctggatcgtctaattcagcgtgcacttctggataagccgcattgacgattgaatcgccagtatgtggcatactttgccagatttcttccgtgacaaatggcatcactgggtgtaatagacgcaatgtttggtctaaaacataagccaagttataacgtttattggcaatggctgcttggtcgtctccgtaaaggacttccttcgccatttcaatataccagtcacagaaatcgttccagataaagttatacaatgtccggcctgcttcaccaaattcgaagctttcataaagccgtgtaacatctgccaccgtttggttcaattggcttaagatccatttgtccgttaaatcaaggttagcggcatctggcatcttcgttggcgctggtgtgtcttcaaggttcatgatgacgaaacgacttgcgttccaaatcttattgatgaagttccaggcagcatccatcttcgtgtaactgaaacgaacatcttggcctggtgttgagccactcgttaagaaccaacgcaatgcatcggcaccgtatttttcaatgacttccattgggtcaatcccattaccaagtgatttactcatcttacggccttgttcatcgcggattaaaccgtgaatgaggacgtgttcgaatgggcgttgttctgtaaattcgagactttggaaaatcatccgtgagacccagaagaagatgatatcgtagccagttaccaacgtattggttgggaagtagcgtttgaagtcaggcgcttcagtgtttggccaacccattgttgaaaatggccataaggcactactgaaccatgtgtctaggacatcagaatcttgagtccagttttcgatatcttttggtgcttcttcgccgacatacatttcaccagtttgtttatggtaccaagctgggatttggtgcccccaccataattgacgcgaaataacccaatcatgaacgttttccatccattgtgtgaaggtattttcgaatcgttctggcacaaagttcaccttttgatcggttgcttggttcttcaaagccatttcagcaagtggcttcatcttaacaaaccattgcgttgaaagccgggcttcaacttgtacaccggtccgttcagaatgaccaacactatgtgtcattgggtcgactttaatcaaataaccttgttccttcaagtcagcaacaatcgctttacgtgcttcaaaacgatccatgccgttatacttgccggcactttcattcatgctggcatcttcgttcatgacattgatccgtggtaagtcatgccgattaccgacttcaaaatcgttagggtcgtgtgctggtgtaatcttcaaagcaccagtaccgaaatccttatcgacatagtgatcagcgataatcggaatttcacgattcattaatggtaatgtgaccgtcttgccaacaaggtccgcataccgttcatcatctggatgtacagcgatagcagtatcaccaggtaatgtttcaggacgtgttgtggcaatttcgatgctcccagaaccatcggtcaatggatagttaacatgatagaaggccccttcatcatcttgatgcaacacttcgatatctgataaagccgtccgtgcttttggatcccaattgatgatgtattcgccacgatagattaagcccttgttgtataaggtaacaaagactttacgaacagcgtctgataagccatcgtctaatgtgaaccgttcacgtgaataatcaagtgataagcccatcttagcccattgtgcgtggatggttgcggcatattcatctttccagtcccagacttgttcgatgaatttttcacgacctaagtcataacgtgaaatcccttgttcagctaattttgcttccactttagcttgagttgcaatcccggcatgatccatccctggcaaccagagtacatcatacccttgcatccgtttttgccggattaacatatcttgtaaggtcgtatcccaggcatggcctaaatggagtttacccgtaacatttggcggtggaataacgattgaataaggtttggcatctggattggcatttggcttgaataaatcagcgtctaaccaatcttgataacgaccggcttcaacttgatttggatcatatttggttgacatttctttgtgatcagtcatcttgttcactcctttaaaatattgcgtttaatggcaaacaaaaaagcattcctcacaataggacgaatgctttttcgcggtaccacctaaattaggactagactagtccccaactcatgatttgttaacgaacgaaattgtccggttagccctacttaatttcaggttaacagctcacaagctaccgattaattggtcattggaagacgtctcagccatgcatcttctctctaaactagcccaatcttaatcgctcttgttcaacgcgttgttaatagtttagctgagtgaacgccaaaggtcaagcgtcaccggcgttcattctgaaaataaatcccgaatcttctccccaaaaaaatcctgagaacaacatactgttattctcaggatttttatagtttaaatgcaaaaaaataagcctgtcggtcgcgaatactcacaaccaacaggctcgtttttaaggttattatttgatttttgttttaatgtaagcaacggcatcagctaccgtaccgatcttttcagcttcttcatccggaatttcggcaccaaaagtgtcttctaattccaaaacaaattccacaatatcaattgaatcagcatccaagtcttccttgaagttcaattcgtctgttacctgatccttatttaactcaaatcgatcgccaataatagccgcaatcttatcaaagatttcttgttcattcataattaaaaacctccaaattgaaacccttacctacgtacttaacactttgggtatccagtgattatacataacttcgcaactcaattcaagtaaatcaaatcagacttgcgaagtatattgtagcgcctttggaacacattgtccacctattttaatcggtttcttttgggctattttgttggtcaaaataatcgattactttttgaatcgtttggttcgccagcattgcatgaatctggcgaacagtgtagtaaaccgtgcggccatctgcagcaccgtgcgccttaacaacaggggcttttaagcctaataaaacagccccgccataaacagatgtgtcgaatttatcacgaatcccaccaacactctttttcaagagtaaaccaccgattttttctttgacaccagcatccataatcgcatgtttgacttgcgacatcacgattgtggcagtcccttcaattgctttaagcgtcgcattgccggtaaacccatctgtgaccacgacatccgcaaccccttttaagagttcacttgcttcaacgttaccaatgaagtttaacgttagatcatctgccagtagttgatgtgctgccttatgcaactcatcacccttgccagcttcagtcccattattcaacaaaccaattcgcggcttttgaatgccacggacgtcttgtgcgtagaagttccccattaagccatattgatgcaaatgctccggctttgcttcggcgttggccccaacatctaacatattgaagcctaaatctgaattaatggctggtagggtaggcattaaacctggacgatcaatccctttaatccgaccaatcacgaataatccggctgctaagagcgcaccagtattccctagtgaaaagagtgcgtctgcttccccatctttaactgcctgcgccgccagaaccattgaagcttgctttttacgccgaatcgcacgcactggttcatcttcgctggtgattttttcggtggtatgcacaatcgttaaccgcgtcatatcatcaatcaacggtttaatttgtgcttcatcaccatacaacgtaaattcaacatctgttaattctgagcgggcttgtaacaccccttcaattactgattggggtgcaaaatcgccgcccattgcgtctactgcaattttcatcatcattcctctttccgttttcaatctaacgttaggtaattttgcttttgttgttgtaagtatgttttgagtggcgtatggtccggtgctgccaactcaggatcaagcgtgaagattttttgcacttcttgttgggcgacttgtaaactcgtaaagtcggctactggatcgccaactttaaagacgggcaatccagattgacgatcaccaaagacttcccctggtccgcgcaattctaaatccttctgcgcaacgacgaatccatcagtggtttcagtcataatcgtcatccggtcaacaccttgttggttcttcggatcagccaccagaatacagtatgcctttttcttacctcggccaacccggccccgtaattgatgtaattgcgccaacccgaaccgatccgcatcaaaaatgagcatcaccgtcgcgtttggcacatcgacaccaacttcaacgacggttgttgaaaccagtaattgaattttgttctcagaaaaagcgttcataatctgatttttttcatcatcttttaactggccatgcaacaatgcaacatggtaatcaggttcaaattgttccaccaacgttgcgtaaatctcctcggcattctttaaatccatctgttcagattcggcaatcaacggtgtaatcgcaaagacttgcgaatcgtttgcaagttgtttacggacaaagctgagggcttgttcgacttgattactacgcacccaactggtttcaattggaatccgtccttttggcaattcatcaatcgttgaaacgtccatctcgccatacgcggtaatcgccagcgtccgcggaatcggggtcgccgtcattgcaagaatatcaggctgtaaccccttttcacgcaaaattcgccgttggttgaccccgaaacgatgttgttcatcaattacagcaaagcctaacttatgatagaccactgcatcttgaatcaaggcatgggtgccaataataatattgatgcgcccggattcaatgtctgccaacaacgtccgccgttctttagccgtcgtcgaaccggtcaataagccaacagtcacgttcattggtgccaataagcgttgcaagctttgatagtgttgttccgccagaatttccgttggcaccatcaatgcggcttgataacccgcagtcactgccgcgaacagcgcaatcgccgccacaatcgttttcccagaaccaacatccccttggagaaggcgattcatatgcgctggtgattttaaatcaagacaaatttcattcaccactcgcttttgtgcatcggttaaatcaaacggtaaggtttgaataaaatctttaagtgcttcattttggtactgcaaagctaaaccgtttgccacatgccgatcagcctgtttaatggcttgtaattgaatctgatataggaagaactcatgaaaaatagcgcttcggcgtgcttgctttgcttcaggatacgttttagggaaatgcatgccagcaattaagtcgcgttcgttcattaacttatagcgcgtgcgaatatcctctgggatcaattcgggaataacgtcctgatacaaatcaaaggcttcttgaatcatcttgaccagtgtcccttgacgcacacttttattaacggaatagatggccgcaaacgatggattctcagccgattgaaccgctaggaccttcatccccgtcaatgtatgacgtttagcatcccacttgccataaatagcgacatcgaccccggcttcaaatttgtccttaagatagggttgattaaaaaaagtaaccatcacaacgtcatgttcaatcaagagccgtacattcagccgggtcttccctggtccccaacgactgatgaccggatcagcgacgaccgttccttttaacgtcaccttttcctgatctgccgcttcggataaatccttgaccttcaaatcttcgtaacgaaacggaaaataatacaataaatcactaatggtccttatgccaagctgatcgagggctgtcagacgtttcgggccgacgccagctaacacagcaacagaatccgttaaacttaacattgacagcctcctgtaacgtgctttcaaaagcatcctgttgcgtttagcaccattagccaaacaagtagctacgctagtcattcggctaattaaactaatcctcacaggataagcacttttgatacacttctttttcttaacgtgctttttaaccatattccaaggttaaacgtacttctactaaaaaacgggaaccaggtatattcaacctcattcccgttttatttgattaactattcaactgaaatcaagtatgggtaaactggttgattcccttcgtgtacttcaacttctaattctgggtcttgggccataattgcatcactgatttgttcagcttctgttgcatcgccgtcttccccgataataattgtgacgatttcactgtcttcatcaagcattgtttggaccatttcaatggctgctgttaaacgttcagccgttgagaccttaatcttaccatcgataatccccatgtaatcgtctttcttaatttcaagtccatctaaagtcgtgtcccggattgattgcgttacttgaccactaatcacggtatctaacgcctctgtcatggcttcttgattagcagccaattcagcagatgggtcaaatgataagagagcggtcatcccttgagcaatcgtccgactttgcacgattgcaactggaatatcagccacttcggcagcttgttcagcggctaagaagatgttcttattatttggtaataagatcacttgtttagcattggctgctttaatcgcatctaaaatatcttgcgtacttggattcatggtttgaccaccacttaagatataagtagcccctaaactcttgaagagttcagcaatcccatcaccggccgcaatcgcgataatcccattttcaacaggttctgcttgcacaggggcagcagcttgttggtcgttttcaacaatcgtatcatgttgtaaacgcatgttatcgactttaatcttcactaatgaaccaaagtgttggccgtaagccatgactgtccctggatgttctgtatgcacatggaccttcaccacttcttcatcggctaccactaagagagagtcaccaacaccgtttaaatgattgcggaattcatcataatcaaattcgcgatcgacagttgtcccgtcaccaagggcgaccatgatttcagtacaataaccattttcaatatcttctgtacccatttgagcggtttgatgatgattggcattgaccatttcatccatttccgcttcatcaggtgtgtaaagatcttttgcaggtgcttggcctgttaaaccttctaagaaaccttcatagatgaagaccaatccttgaccaccagaatcgacaacgccgacttcttttaagacagggagtaattcaggggtcttcaacaaggccttcttagaaccctcaacaacagcttcgataactgcaccgatatcatcagtttgaccggcaaccttggcaccagctttggcgccttttctggcaaccgtcaaaatcgtgccttcaacgggtttcattactgctttataagccgtttgaacaccatttgtgaatgcgtcagccaaatcttgtgcatccaacgtttctttttcagccatgctcttagaaaaaccacggaaaatttgtgaactgataaccccggagttaccccgagcgcccatcaaaagccccttggctaaactcttagataattcaccgacagattgcgcgttgttttcattaactgctttggccccactttgaaacgttaaactcatattggtcccagtatccccatcaggcactggaaagacgtttaatgaattgacaaattctgcatttttagtaagccgatgtgcagcaacccgcatcattgcttggaattctgctgctgtgatttcagtaactttcacgaatgttcctccttgaacaaaaacaaatagaactggacctagtggccagctccgctaattagttttagtcttctaatacccgtacaccttgaacataaatattcactgagttcgcactgacacccaacattgtttcaagattgtacttcactttactctggacgttacggcaaacttcagagatcttaatgccgtaaccaacaataatatagacatcaatcgcaacgccattgtcttcttgacggactacgacaccccgattataattctcacgattcaaaatatcgtttaaattgtcacggatttgattcttacttgccatcccaacaattccgtagatatctgttgcagcaccaccaacgacggttgcaatcacgttattggtaatatcaatatcgccatattgtgttttaattttaacagccattaaaatagcctccttgtgccatacttattgttattttagcatagcggagaagagttgcaaagcaactggtgatgaattcttccccaaatgcggcttatttttggactttaatgagtttaaacgacttattttggactgtcaagtaaatttccttgaaagagctcttgcattccccaaactattatggtaaattatttaagtgaattgtataagccggtgtgcatgcatgcaactattaagactaactgaatcatattatgtttctcgttaattctaccggctttacttaaaggaggaataagaccatggcaaaagacgttattaccggccgtaaaacatcatttggcaacaagcgttcacacgctttgaacgcatctcgtcgttcttggaagccaaatttacaaaaagtacgtatcttagttgatggcaaacctaaacgtgtttgggtttcagcccgtgctttgaaatcaggcaaagtaactcgtgtataatttcaattgatagaccgccagttggcggtctattttttttggcaaagagtacgagataagtcggctaatcatcgggagatgactgatcgaacacgtttatggcaaccaaaaagacggctcggataaaataattttatccgagccgtctttttaatccttactttgaatcaccgcaaccaccccagtttcaaaactgaattggccggtctcaccgatgaactcattactagcccatgaaatcgggacttgcgtttggtaatccaccaagcgatatttttcatcaattaaatttaaaccagttgtgggaactaatggcacaaaggccagataccgtttatcggcttctttttgtaattgatacgtccctggtgcatagaaccgaatcgtattttgccgatcgcgcatctctaagcggtctaaaaacggcttaaaacgtgtttctaagggcataaagagattagcaagaaaatggtccaaccgaccgcctgttgcgccataaagcacaacttgatccgcattaaattcagttagcgcaattgataatgccaactgagtgtcggtatcatctttttctgcttgcacagagcgaatatcctttactgctgattgaacggtggtccgctcagccgccgtcaatgaatcaaaatcgccgactgacacgacaggtgttacgcctttttgcaataagcgccacgtaccacggtctgctgtcacccattgaccatcaatcatttctggctgcgccaattcgggggcccactcactgactggtcctcccaccaacacattaatccgcgtcatgagcagcctgctttaaagttgcaatccgggttgctaaatcaccggcaaacgtatatgaaccggcaacgaaaacatctgcgcctgctttggcacacgcaccgacggtttggtcgttaaccccaccatcgacttcaatcgtataatctgcatcagcatgttgatcgcgataagtcgctaattcagtgaccttatccaacatcgctggaataaacttctgcccaccaaaaccgggattaaccgtcattactaagacttgatcaaccaatgataagactggttcaatcgcactgactggtgtccctggattgatcaccacacctgctttaacaccagcatctttaatcatctgaagaccacggtagagatgttgcgttgcttcggcatgaatcatgattaagtctgaaccagctgctgcaaattgttcgatgtagcgttctggttgttcgaccattaaatggacatctaagcctaacgttgtcaatggccgcaagccagttactacttgggggccaaacgacatgttggggacaaacatcccatccatgatatccacatgtaatagatcagcgcccgccttttcaaggttttggacgtctctttgtaagttcataaagtctgcgcttaaaattgaaggtgcgatttgtttcatcatcaaaactccgatcacatttttattttgacttcttgtaaactggccgaatatcctttaattctgctctaaactgtaaataattcgtataacgactttgcataatttcgccactgtcgacagcttctttcacggcacatttcggttccatcacgtgttgacacgttctaaacttgcatccttgcccgatttctctgaactctgggaatcggtcaaccaaggtttcaatcgtgacgtttaataaaccaagtgatgaaaagccaggcgtatcaccaactaacccatcattcaacggaatcagttcaatatgccgggttgtatgtttcccacgatttaaactctgcgaaatttcggcagttgcaatattcaagctcgggtcaatgtggtttaacaacgttgacttaccggcccccgtttgtcctgtaaagacggttgttttatgcgggaacgtgtcttcaattgccgtaattatctccggtgtaaaggcggtccgcggtgcaaaaatttgatagccgatcttcgcgtaatacgccaagtaatcactaatttcttggtattgttgatcactaatcatatcggtcttggttaaataaactaacccttgcatgtgcagcgattcaatataaatcaagaagcgatccaacaaattcaaggagaatgctggttccaccgccgaaacaattacgacagcattatcaatattagcgactggtggtcgaatcatctcatttttacggtctaaaatctcaagaatatagccactttctgtttcactttcactctcgaattcgacaaaatcaccgacaagtggcgtaattttccgtttacggaaattaccacgcgcacgcgttcgataaattttgccttcactttgtacatcataaaacccactgagggcgcgaataatctgtcctgtctgcaataggtcacctcccaattagtttgtcacatggtcatcagatagaatctcttgaccatttcttaaaatccggaaacggccggcttggtccgctttaatcgtaaatggcaattcaacggttgtatccgcggtaatcgtcatttctttataaacactcattattgaatgcgtgctatcttctaaataaatcgtaatcttattcgtcgtagccgttgaagtactacttgaactagagctcgtactactactgtcacccgattcgctcgagctgcttgtactactttgtgaagttgctaaggaattatcaaacggaatcgtaatcgacttcgtaaaactcttggtagcgggcgcttttttacctttagaaagtaccacgttaatattggcaccttcttgaatagatgcaccactaccaggtgattggctaatgactaacccttcatcaatcgtattggagtaatcctctgaaaaagtaaccgtcaaaccaacgtcatcaacatagtcttgaacagcctgtttcgtgtaattactcaaattgcgtaaagtaatgcttggcttgccgctgctgacagtcaaggtaatcgtcgtcttacttgggacaactttttcacctgcggcaatgctttggtctaaaaccagtcccgaagcaacactgcgtgaactctgatatttgcgcacaaccgtcagtcccttttgtttcaataacgtgctgacatctgtgaacggtttgtccgtatagtcttcgatctcatactttttacgacccgtactgattgttagatcaaccgtactgcccgatttaacatgcattcctttaccaggcgtcgataaaatcacatgccctttgctgtacttattgctagtagttttttgaatcttaccaacttttaatttatctgcggttaatgctgcagtcgcgttttcttgcgtcatgtctgtcacatctggaacagtcacttcactgccttgcattgcgtacgcagcgaagaccccgagcatcactaacaagactacgccaagccccacaaaccaccatttccgcttcgacttcttatgcggctgtttctttttctgatcgtcttttacttcagtctcatctttgggtttggcttctggcgcatcgttttggcgcgtaatcccttctgggtcgagagccggaatcacctttgtttcacccatatcaccttgtgagggcacgaatttcggttcatgcgcccgactagctgataatgaggtactcaaatcagtggtcatttgcccaacatcactgtagcgttcgtccggatctttggcagttgcttttaacacaacgttttccaaagcttgtggaatccgcggatcataatctcgaacgggtggtacagcatcttgaaaatgtttaatcgcgatggaaacagccgattcaccttcaaatggcaccatacccgttaacatttcatacagaataatcccgagtgaatagatgtctgaacgtttcgttgccattgaaccccgtgcttgctctggtgataaataatgcactgatccgagtaatgtattggtctgggtcatcgcggtttcactgagcgcaatcgcaatcccaaaatcgctaatcttaacgttacctgcttcatcgaccaagatattctgtggtttcaaatcacgatgaataatatcgtgcgcgtgggcattttcgaccgctgataaaatctgcgtcataatatcgacgacgcgttgataaggaatcgggaagtgttcaacgatatgcttctttaaatctgttcccttcacatattccatcacgatgtattgcatgctgttttcttcaccaacatcatagatactgacgatattggggtggttcaattcagttgtggcaagtgcttcgcgtttaaagcgacgtaccgtgttcggatcgttccgtaaatcaagtcgcagcaccttgaccgctacttggcgatccaaaatcagatcttgggccagataaacgttggccatgccaccttctccaattggacggataatctgatagcggccattgaccgcgtagcctgtctccatcatcgcgcaccctcctcaccagtttgatgtaagattaacgccgtaatattatctaagccaccggcatcatttgcttgttgaattaatgccgcacatttttcttccagcgatgtcggtgtcatcagcgtggtcttaatttgttcatcatcgaccatattggttagcccatctgtacataataatagataatcatctggttcaaattcgtaaattgttacatcggcatcgacatcttgcgaaacgcctaatgtgcgcgtaatgatgtttttttgcggatgatgctttgccgcttcttcggttaactccccttgtttcaccaattcatttaccaaggaatggtcctctgttaattggcggagttcgttattccggaagcgatacactcggctgtcgccaatattggcaactaagtaattggcacctgaaatcaacactgcgacgagcgtggtgcccatcccaaacaaatcatcatactgattagccttcgctaaaatatgtttgttttctttttgtaattcgaaaattaaccatttaaccatggattcaatgtcggtatcatcagttcgttcgaactcgtacccaatatgggaaaccgccatttctgaagcaacatcgccgcctaaatgaccgcccatcccatcagcaacaatcgcaaactgcgcaccgcttttattggtataaaagccgacatagtcctgattattttggcgttgttggccgacatcggtttgaaaagcaactttcataagaattcacctcaattaataatttaagcccgtcgtgttaaacaagcgatgaaaaagccgtctgtttgataatcatcgggatagatttggacaaacggtgtcgcttgattggctggcaatggtttgtcgagtgctactggtacgatttcaaattctggatgattggccacaaaagccgcaacaacttgttgattttcttctgggacaatcgtacaggtactgtaagtcaattgaccacccacttttaaggttggtgcaacggcttctaaaatcgccaattgaatcttctgaaggttcaataagtctgctgcttggcgaccatacttgatttccggtttacgtcgcattaagcctaagccagaacatggtgcatcgactaaaatcttatcaaatgtttcaggttcaaattgttcaccgactttgcgtgcatcgagcgcccgcgcatcaatgacgtctgcaacatgcaaacgcttagcgttttgctcaatcaagcggactttatgttcatgaatgtctaaggcagtaatttgcccccattgactggcatccaaataagtcgccatatgtgtcgttttcccacctggggctgcacaagcatccaagatccgatcacttggttgtagttgcaaacttggtgccactaacatcgagctttcatcttgaattatatacgcgccttgttcgaacaattcaccgctggctaagtgaccgccgtgggcaactaatccagcggctacaattacactcgattcaatcgttaacccgtcagcctgtaagtctgccaaaacggcatcaactgaattaacacgggtattgactcgaatggacgcattcgctggttggttaatcgttgccaataagtgttccaattttgattgccctaattcttggtggaacttcgccactaaccactgcggcatactgtaagtcacacttaggcgttcgattggatcggcaattgctgctaaatcaggcaatccagtccgttgttggttccgtagaattgcggtgaccaacttagccgtgccagcatggcccatttgtttggcaatctcagttgcttcataaaaaatcgcatgttcaggaacacgatccaaataaacctgttgaaaaactgccgtccgtaagacttggcggacccaagttgccagtttagctggtttttgaataaagggggctaggtaataatcgagtgtcatttcatgttgaatcacaccatacacgagctgcgttaaaaaaccagcatcttggggattcaagtggttttgtttaatcacttggtcgagggccaagtttgaataactgttttgtttggcaaccgccgttaaaatttcaacagctaaatagcgtggtgtctttttaggcatcttgcaccaccacttgttgtccgactgcgagttgtttgccaaccccgtttaagaaagattggaccggcattttagccttaccagctggttgaatctcggtaatcttcaaaacactgccattgccggctgctaattcgaaatcctttttgttgatagcgacaatcacaccggctggttgatccgtcgttgtttcagcaacagttgcttgccataattttgtccgttgaccattaattggcaaccaagcgcctggttgtggccgtaacgcacgaatctggttgaccagttgcgttgctggttgctcgatatctaattgttcttgttccttagtaatattgtaagcaaacgttacttgtgcttcatcttgtggtgtccggggcgcggtttgatcgataatgcttggtaatgtcttcaataatagatctcgaccgacataacttaacttatcaaataaagtcccggtgtcgtctgaagcttcaattggaatgctggcttgttcaatcatatcaccggcatccatttttttagccatatgcatgatggtaatcccaatttctgaatcgccgtttaacacagcatattgaatgggtgcaccaccacgatattttggcaagagtgaaccatgcacattgatggctgcaatcttagcggcttctaataacttcgttggcaagaattgaccatatgctgccgtcacaattaaatctggttgcaaggccatcacgtccgctaattcttgactaccactgagtttttcaggttgaaaaacagtcaggtttaagcgaacagccgcttctttaacgggtgtttgttgtaagacttgcttgcggccaactttccggtctggttgggtcacaacggctaggacttgataatcgtgtgccacaagggcttctaaaatcggtactgaaaattggggagtccccataaatacgatggatgtcattaatcaatcacgctcactttaagtaaattgtaggggttcattgtccaacccaatcttgaaaccatgacgggtatcaatttgggtcgtttcgagaatctcggcgagtttcgcctgaagttgtggttcctgtttatatttaatcacaatttgatagaaataacgattattaatccgcgcaatcgacttcggcgtcggacccagcacaatcgcttggtcggataagacgggccgtaattgacgggcaatgtggaaactcttcttggctgccaacgcttcttcaggatggctaatcgttaactgtaccgtaaaataatacggcggatagccgccccgatggcggactgccatctcatactgatagaagccttcataatcatgttgcttggcaaattggatggcgtaattttccggattaaaagattgcacgattaccgcaccggttttatcggcacgaccagcacggccactgacttgcgtcaataattggaacgtgcgctcacttgcccgaaaatcaggtaacccaagggcggtatcggcgttaatcacgccgactaacgttacatcagggaaatcaagccctttggcaatcatctgcgtgcccaataaaatatcggcatcgtggtcgccaaagcgtttgagtaatttagcgtgcgcaccttttttgcgggttgtatcaacgtccatgcgcagaatacgggcatttggaatcagctcttggagttctgcttcaactttttgtgttcccgttccgaaatagcgaatctggcgactctgacaatttggacaagtccgcggaattgcttcttcatgaccacagtaatggcacttcatcgagtgcgtatccatatgcaacgtgagtgagatatcacagttgggacactgcaagacaaagccacaatcgcgacacatgataaaggatgaaaaaccgcgccgatttaataagaggacgctctgttcgcccttttgcaaccgatcctttaacgcatctaatagcgcaggtgaaaaattgctgctggcttgttgcttcatcgcctcgcgcatatcaaccaactcaactgccggtaatggctgttgattaatccgttgcgtcaggcgcaagagttggtagacgcctttttgggcacgggcacgcgattcaagcgatggtgttgcactcccgagaatcactgggcaatgatggtactgactccgccagatggcaacatcgcgggcatgatagcgcggactttcatcttgtttataggaagcttcatgttcttcatccatgataatcacaccaatattctccaatggtgcaaaaacggctgagcgcgccccaacgacaacgctagcttctttgcgttcaattcgccgccattcatcatacttttcaccttcggataagccactatgtaaaacggcaacttgatcaccaaagcgacccttcacgcgtttgaccatctgcggggtcaaagcaatttcagggactaacattaatgcagttttcccctgttgcaagaccgcatcaatcgtttgtaaatagacttcggtcttaccgctgcccgtaatcccttcgactagaaaaacccgatcagattgggccttagtagccgctacaacggcttctaccgcatcagcctgttcatcagtcaacgccattttttgcgtcgttgtgacggttttaggataaggatttcggtaagcttcaactttaacttggcgtaaccaacctttgtcggcgcctgtcttgatattctcccgggtaaaagtcgtcttggccaaaacatcctttaataagggattgggctgatcaattaaactttgtaaataactaatgagttgactctgcttttgcgctgacttacgtaagccggcccgcgcttcttctaactgttcaaacgataatgccggttcaatcgccgttaattgcttcacgcgggcgcgatcatcgacatggtagaccacttcgattttcccttggcgttgtaactgcatcaattgttttaacttttcgggatctagcgactggtcaaacgttaattcgtcgttaccattgaacaggcttgcttgtaaggctggatcaatttcatcaactagttgcgcggtcttagaatacttagcacgcatcacacttgggagcatcgtttgcaagcacgtaatctgaaaggcataggtccgctctgccaaccaacttgataattgaagtaattctgaattcacagccggttgtaaatcaatgaccgccgtaatcggctttaattgcccctcaaaattggcttgatcttgaatggacaaaataaagccttgaattaatcgatcacctttgccaaaaggaaccgccacacgcatcccaggttgaatactgtctgataaagtatccggtacttggtaatcgtatggccgattagtttgcatcgtcggcacatcgacaatcacttttgcgatttgtggcatctaaatcctcctttttagttaatctaacaagtcagcaactcgttctagaatttgagtcgcaatcacccttttatccgccaacgctaatgtttccggtgctgcattcggttgtaaaagcgtaaccgcattttgatcaacaccaaagccccgatcatgctgactgacatcgttcgccacgagtaaatcaacatttttagctgctagtttggtttgggcattttgtagtaaatcatctgtttctgccgcgaatccgaccaagaattgatgcgtcttctgctgcccaagcgtcgccaaaatatctggggtacggtctaaagttaactgcatctcagttgtgttcggttgttttttgattttgtgcgtgacatattgggccggtttaaaatcggcaaccgccgcagccatcaccacaacatcggccccttcaaagacactgctaactgtgccttgtaattgcgccgccgtttcaacgtaaattattttgtgcaaaccagccgggactggcaattctggacgcgtgctgatgaggatcacattcgcccccatcgtcacggctgcttgggccactgcataccccattttaccagaagaccggttgccaatgtagcgtaccggatcaattggttcttgtgtcccaccggcagtcaccaccacgttctgcccgcttaaccgttgcggtccgaattgttgcgcaacttctgccataatcgcggtttcttcagggaaccgcccgacgccagcatagccttccgctaaaaagccggtatccggttccatgacagtatagccatctgctttaagttgggttaaattccgttgggtagctggattaaaccacatatgttcattcatcgccggcacaattaatttgggcgcggtagtggctaacaaggcggtcgagacaaagtcgtcagcaatcccattagcgagtttcccgattagattagcagtcgccggagtaatcaccgccagattagtccaatccgctaagtgaatatgggcaacccgatccggttggtcttgattaaacaaatcagttaacacgggtttacgcgttaatgtggcaaacgtcagtggcgtgacaaattcggttgccgcctgagtcattgccacttggacctcagcacctgctttaatcaatccgcgcaccaaattagccactttgtagacggcaatgccacctgtcacataaactgcaattcgtttattcgttaaatccactttcaaaaccccctaaaactaaaaaaactgcactttaatttaaacatccatcgatgaataaactaaacatgcaggttctttaattattcttattcgccgtctttttgagcgagcttatccattttttcagcatctttttcaagcatcaatgaatcaggatcaataatgacattgccagcagcaatttcttccattgccatcccaaccgttttaggtgatttgtattcagataacatcttaatatcaccggcttcgatttcatgggcccgcttgctagctaaaacagccaatgagtaacgtgagttcacgttttctagtaacttatcaattgaaggatatacaatcatattattattcccctatcattttcttgtattggtcgatcacacgtggcactcgtaagtgttcactttcgataatcttttcgattcgttgaaccgcatttggaatttcgtcgttgacgacagcataatcgtaattttccatcatcttgatttcgtcggctgctttttgcatccgcttatcaatcgtggcttgatcgtctgtgccgcgtttttgaattcgattccgcaattctaataaatcgggtggtgtcaagaagatgaagacgccatcgggacacttctcgcgcacttgcattgcgccttggacttcgatttctaataaaacatcgcgccctgagtctagtgtctgattcacatacttcatcggtgtgccataataattatccacgtactgtgcatactctagcataccatcatttgcaatttcttgctcgaattcttctttgctcacaaaataatagtcaacaccatcttgttcgcctggtcttggctttctcgtcgtcatcgaaactgaatagtgaaaatcacgaaattcatcttctagcattgcttgacggacagttcctttaccgacccctgatgggcctgataaaacgatcaacattcctcgattggacatctacgtaattccctcttcttttataaaatagttaaagtctattttgcactatttggcgggaaatttcaagtctactttgtttccatctcatttaaaattaaccttaaggacgcaatttcgtcgtttgacagcgtcacacccttacccattttggcatgatccggtgcccaatctcgcaaatcaaattttggtgcacgttgattccaagagattaaattcaattctttacgccaaccggctggattttcactcaacacaccgatttctgccataatttcatattcaattttgcccatcaaatcaccctttctatcagctcatcctattatacacgaaaaaaatcaaaaaatgccgcttgcaattctgaacatttgttcgtataataaaaacacaaacaagtgttcggaggatgaaatcatggaatttaaacaagcaacggttagcggactcagtcaacaattggttaaacaatatcaccgcttttttgaacttacaccagaagcgactgcttttgttgaacaaccccaaatgcaacctgctcagattcaattatttatgacccaagcgtttgaacgccactaccatgttgcggtgcaattcaatgttaacgatcatctcgaacaagtgaccgggcgcttggttaaacaactcagtgcgaacaagtatctgctaaaagagtgtcgttcgaacctctacaagattgtcctttgcaatcaaattcgttacattcaaaagaaaagttaagcaaaaaaataagggtgcagccaaaaaaatattttggctgcacccttattttaatgtcggcgactttgcttagccgtttccgctaatgccactaattcttcggcatgttctaaagttaactctgttacttcagtccccgctaacatccgcgccagttcagcaatccgttgtttaccggttactttttgaacggacgtttccgttcgattttgttttacctgtttttgaatttgatactgatgatcactcattgctgcgacttgcggcaaatgcgtaatgcagagcacttgcgaatgttggccaatttcactaatcttattggcaattgcttgggccacacgcccactcactccggtatcaacttcatcaaagatgatgctagtaacgccttgtgattcggagaaaatcgttttaagggctaacatcaagcgcgataattccccaccagaagcaattttagcgagcggccgtagtttttcaccagggttgggttgaatgtaaaattcaactttgtccatcccggaggccatgaactgttcctgttcatttggcaagaattcaactttaaagaccgtcttttccatgtataacgcttttaactgttgatgaaccgctttttcaagttgcttagctgctttttggcgtaattgtgtcaacgtttgtccgtttgtcctaagttgttgttcaagttgcgtgaattgctgctccaactcacttgcgttcgcttcagttgcttgcatcgctgctagttcagccccgattttttcaccataagcgagaatttcggcaattgaatcaccatacttatgttccaaattattaatagtttctagccgttgttcgatttcatctaaccgtgcttcatcccattctaagtttgaaacttcccgactaatatcaatgctactatcttgcaacgtgtaataaccagtctgcagactgtccgcaatacgcttgaattctggatcgagttcagcaatttcttgcatctgattcattgcaactgcgatttggtctaacgcattcccgtcttctcctgctaaaatcgtgtgactggcttgcaacgcttggttaattttttgaaagttcattagtttggctcgttcttcgactaacttgctttcttcatcagcctgtaattgggctgcatcaatttcgttagtttgaaatttcagcatatccaagcgttgggcccattcttgttcattttgctgtttttgcttcaaggcacgctgtgctttacgataggcagcataggtttcggcataggctgccttcgcggttgttaacttttggtgcgcaaattcatccaacaaccccaagtggcgatctggatacattaattcttggtgttcattttgaccgtgaatatcaactaaggtttccccaatatgcttcaaagtggttgtattgaccaaatgaccgttgacccgacaaacattgtgtccattaacggctaaatcacgctgtaataagacggtttgttcgtcgtgttcaatgccaaactggtctaatactgcggcggttgtgccattaggcgtcatcgtaaataagccttcaagggtcgcttttttagcaccagtccggataaagtcttgtgaaccccggccaccaacgagtaacccgactgcatcgataataattgacttaccggctccggtttcccccgagagcaccgtcatcccttcttcaaaactaattgctaactgatcgataattgcaaaatcgtgaatgaccaactcttgtaacatctgatcatccccctttcgtttctcttgatgctaaaaaaacttgccaaattactttagcaagtcttcaataaacttcgtaaactgtttagcattttcttctgatttacaaatcaccaacacggtgtcgtcgccgccaattgtaccaaatacaccactgagctgcatttgatccaaaagattagcaattgccgtcccgttacccggtaaggctttaatcacgacaaaatagtcttgttggttatgcgtaatataggcgtcacgtaaaatccgacgcaacttttctttaacgtctaatttcttttcaggcggtaggctatagtgatagccctcgtccgcatttggcactttaatgagctgcatttctttaatatcccgcgaaatcgtggcttgcgtaacatcgatgtcttccgcttgtaacagcttcacaaaatcctcttgtcgttcaatctcatgggtctggattaaattttttaacagtcgttgccgatctaccttgcgcattaaaacaccctcttcatgtgagaaattattctattcctcaatgatagcgcatttatacataaaatacaaagttttatacactattttcccgttggtcgtttcaaagcagcataggcattctctaaaaccgtatcaatattcacgttttgggccatcgttccagtctcagccgtcgtattccgtagatgaatcaagaattcaatattgccttcgccacctttaattggtgaaaaatctaaccctagcacgtcgtagcctgtcgctaaactataatcaacgatgtctttaaccaccatcttatgcactttcggatcacgcacaatcccgtgtttaccgacattttcagggccggcttcgaattgcggcttaattaaagcaaccgcttcgcagtccggtttcaagatgggtttcaacggcaccaaaatcttatgtaacgaaataaacgaaacatccgtcatggcaaaatctggttgaccattggtgaaatcttctggttgactgtaacgaaaattaacccgttccatcacgacgacgcgtggatcttcgcgcaatttccatgctagttggttataacccacatctagtgcgtaacagagtttggccccatttctaagcgccacatcagtaaagccccctgttgaagaaccgatatcaagtgcgattttatcctgtaaatcgatgttgaaaacctcgaccgctttcgccaattttaaagcccctcggccaacatacggaatcttacgccctttgacacttaaaacagtttcagcgtcgattttttcgcccggtttgtcgattcgttcatcatttttaccgtacacttcaccagccatcacagaccgttttgcttgttctctggaatcaaataatccctgttggactaataatacgtctacccgttcttttttcatctgttctcctattcattaaaatagtttaaaaaactatttaatagtgctttatctaacccggataaatccgttaaagcagtttgcgcggcctgacaagtctcatccaacgcgtcttttgcaccagctaagcccaataagcctgggaaagtattcttatgttcgtcagcatccttatggaccgccttgcccatcgcttctgtagtgcttgtcacgtctaaaatatcatcttggatctgaaatgccaacccataattttgcgcaaaaagctgtaaactagccatttgttcatcggataaatcagccaaaatcgcccctaagccgaccgcgcattcaatcaaacggcccgttttgagctgatggacttgtttcaattgagctaacgataaagttttagtttgtccttcgatatcttcaatctgaccagcaaccatgccacttggaccggctgcttgcgccaataatcgaacagtacggctctgctgatcagtcgtcaaatcggtcgtcgttaaccattcaaatgcaagtgtcaataacccgtcgccggctagaatagcttgcgcctcgccaaaaaccttatggttcgtaggttgaccgcgccgtaagtcatcattatccatcgccggtaaatcatcatgaatcaatgagtagctatgaattaattccaatgcccccgctacgcgatacgccgtttgattaatcggtcgccccacacttgcaagcaccgcaaataccaaaagtggccggagacgtttcccgccagccatcactgaataggtcatcgctttttgcaaggttggttcttcaatctgggcaagttgctcagtcaaataggtttcaaatgcgggcacttgttggcgcgcgaacgttttgaaatcaaccattattcttgtgcctcagcatccaatgggacttcttcgccattatctgccatcactttggccatcgttttttcagccttacttaaggtttcttctaatgtttgacttaatttaacacccttttgaaaagcagtcatcgctttttcaagtggcacatcgcccgtttccagttcattcacaattgcttccaattgtgctaagttctcttcaaatgttaatttcttttctgccatcttattcgtctcctttatgagtggccgtaacacgcgcgttcacgaggccatcttggacatgtaactcgattgattggtcgaccgtaaaatcggtcgtttttttcattacattttgattatcatccgttacataagcaaatccgcgtcccaaaattttcaacggacttacgagatccaaggctgccaccgcttgtccagcctgttgccgccgattttggacaaggctctcgattgctcgtttcaaacgatgatcggtatcagtcaacattctttgtgcttgttgaatcgcaccacttggtgattgcgactgcaggcgttgctgcaagagttgtacattctgttgactagtctgtaagcgttgttgttgcgccaacaataaacgacggtgcaactgatcgacattttgtaaatagccgtcatacaagcgttgcggctgttttaagacgtaactgttctgtaagtggaccaattgctttttgtttaatgccaatgttttcgaaaatgcctgatataaccgcaaacgttgttgttgcaacttcaacacttcgtccgtcaaaaccggtgttgctaattcagctgctgctgttggtgtcgctgcccgaacatccgccactaaatcagcaatagtcgtgtccgtttcatgaccaactgatgaaatcaccggaatctgactggcaacaatcgcgcgcgcaacgcgttcttcattaaacggccataaatcttcaatcgaaccaccaccacgaccaatgataattgtatcgaaatccccttgttgattaacttgattcagtcgatcgactaaaatatcagccgcaccgtcaccttgaaccaccgctgggaataagacgagttgggcaattggataccgacgttgcgtcgttgttataatatcgcgaataacagccccagaaggactcgtaatcaccgcaatccgttttggaaagcgcggcaatagttgctttggtgcatcaaacaagccttcagccgataatttagcttttagctgttcataggcttgatacaatgcaccaagaccatctggctccatccgttccacatagatctgatagtttccagttgcttcgtacaaggaaatccggcccacaacaagcactttcatcccctcttcaggagtgaacttaatcttttcaaaagcggacttgaacataatggcactgatcttagctttattatcttttaaactaaaatattgatgcgcattcggtcgtaagcggaaatttgaaatttcgccggttaaataaacccgatccaaatacggatcgcgttcaaatttagcctttaaatactgcgttaatgcggtgactgttaaatagtctgttggtttaaccacgtttagcacgttcctttgcaatctcaatcgtttgatccatgagcatcgtaatcgtcattggccccacgccacgcggaactggcgtcatcgcactaacatgtgatttaagggcttcaaaatcgacatcaccggtgactgttccatcttcaagccgattaatgccgacatcgacaacaaccgccccttctttgacatcctcaatgccgaagaagtgtggtttaccgatggccgccactaagatgtcggctgttttcgttagggcttttaagtctgccgttctgctgtgcgcaatcgtgaccgtggcattggcattgagcatcaaggctgccaatggccgaccaacgatgttactccgaccaacaatcacgacatttttgccagccacgtcaatatcgtgagctgccaataagcgcataatcccatttggcgtacaggccactaagcccggttgattaagccataatcgcccaatattgactgggctaaaaccatcaacgtctttttgtgggtcaatcgcccggataatatggtcttcattaatttgttttggtaatggtaattggactaaaatgccatcaacggtttcatccgtatttagttggcgaacaaccgctaataaatcagcttccgttgtttcagcagacaggcgttttaactcagatgccatgccaattttagtcgctcttttttgcttgctttgcgtataaatcgcacttgctggatcatcacccaccatgacgaccactaatttcggggttaccccttgttgtttgagtgttgccaccgccatttgttgtgcttgtgttaattcatttgcaagtgctcgaccatctagtaattccaaagttaacaacccctatttatcgatatttgatgtttctattttagcatagttaatcggttaattccgggttatcagctgataatgaccgtttaaattcaaaaaaacacgctaaaaaaatactttttaacgtgttttaagtgatttcgttcgtattttactaattaagcttcaacgaatttagataaaacgccgttgataaaaccttttgcttgatcatctgtaaattgtttagcaagttcgagcgcttcattcaacgccactttatcgggtgcttctgttgaattttgcatttcaaacaaccctaaacgcaagataattaaatccggtttggctaaccgtgatagttgccagcccttcttcaagtatggcgttaaagcggcgtctaattctgcttgatgttctgtgacgcccgttaccaagaaggcaaggtagtctggaacagcaacttcttcaacttcttcagcatcgaattgatccatggttaaaacggcttggtaagcatctgccaattctaatgtgtcattagcatttaacgcaaacaacacttgaaatgcagcttggcgaatttggtgtcggttaaaattaggcattaagattggtctccattttgatcaggtgtttcatcgttaaataagtcatctggatcaataatttttggtgctttttcagtgacaacgcccaccacgtgtacgttgacttctgctagttctaaatcagtcatgaacaataattgttctttaagggcttcttgcatcgcaagggcaaccttcggcacagaaacaccatagttcagataaacataaacatccgcattcactttgccatcaatcaccttaagagttacccctttaccgtgattcgaacgaccaaacaattcgttaatggatgatgataacgtcccccgcatttggtggaccccatcaatcttgcttgctgcaatccctaaaatcacttccacaacttcaggtgccatttgaatcttgcccaatgcattttcttgtgtatcaagtacaatatttgtttcttctgccatcgaaacccctcctaacaagttcttgctaatttagcctatgcccgtgagatgtaactcccatcagatgtgttaatcgttaacaaatcaccttcgttaacgaaaaacggtacttggaccactaagccagtttcaagtgttgctggtttagtaccacccgaagatgtatcaccacgaacaccaggttctgttgcagccactgctaaatcaaccgtgtttggtaattcaacccctaaggtttcactaccatacatcatgatagaaacttgcatattttctttcaagtatttcaattcatcattgatttgtgctgctggtaattctaattgttcgtaagtttcagtatccatgaagacgtggttgtcaccatctgcataaagatattgcattgattttgtatcaatgattgctttttcaactttttcagttgaacggaatgtcttttcttgattggcacccgttcttaaattcttaagttttgagcggacaaaagcgccacccttacctggtttaacatgttggaattcaacaatccgccataggttgttgtcaaattcaatggtcaagccatttttaaaatcatttactgataacattgtttatcctccgagcattatataagtatgccattgtcctaatcatagcaagaaatcaggctcaaaagcaagtatttctagccttttatccctaaaagtagctataaaaaaagggaccggcacccgccaatcccttttagcgtattcaatcgagcaaaagtcgatctgaacactcacttttagattgtcaatggtttgttgcctgagtaattagtataccagtaaaactggatttacacaaacagagtgtgacatcagtctgggatatctagaggattaacacagagttgcaaaagattgtggaacaatcatttgtgactcagggttaaccggagagatatgactgatggaacacgtttagaatgtgacgacagccccgcttctctcgcacaaaaaaaacacccacataaagtgggtgtgagaaaaattatttagcttctgcagcgtatacagaaacctttttcttgtttttaccgaggcgttcgaaacgaacgacaccttcgataagagcaaataatgtgtcatcgccaccgcgaccaacattttcacctggatgaatctttgtaccgcgttgacggtaaagaattgaaccagctgttacagtttggccatcagcacgtttagaacctaaacgacgacctgcagagttacggccgttagttgttgaaccgccacccttatggtgagagaagaattgtaaattcatttgtaacatctaaatgcacctcctgtttattaactgtctatttacgttttgtttgtacttgaatgtactgcccgtattgttgcgtaatatcttcaagcgtcaactgcaaattctgcaagagaatctgagctgtcgctaaagcttggcccgaaaccgttgccggaatctgacaagttaacaaaccaccattcaggttatctgcttctacctctggttcaaaaccagcaagcttttgcaaactgttgattgtcccgattgagacagcagaaacagctgcacagacgatatcactcccgtaaggacccgagtcggcatgacccgtaatttgaaaagaaataatttgcgaatcggcattgaccgtaaagtcagcttgaatcatcttatttccctcaattaggcgttgatagcgtcgatcatcactttagtatatggttgacgatgacccttcttttgatgactgtgtttcttaggtttgtatttgaaagtaacaactttcttttcgcgcccttgtttttcaacagtaccatcaacagtaacaccatcaatgtttggtgtaccaaccttagttgtttcaccaccaactaaaataacttgatcaaaagttactttttcgccagcttctgcggctaacttttcaacgtagattgcttgaccagcttctaccttatattgtttgccacctgttttgataattgcgtacatgtgtgcacctcctattttttcttagactcgccaactaaggtgactaatcatagtacttaatgccttagtatgcgcggttgcagctgtggagctcacaattacaacgttcatattatatcgaatatcacagggcgagtcaatgctttattacgcctcgacaaaaaattgtgcgacatcaaacgtcgtattaggtgtttgtaccaattggtataacatcttagccatgtagcgtggtgaatacacaagcccgtcattgacccacttaaagaccaacgctaaactggccaccgctaaataatcaatcgtaatactcatctcaatttgatcagcctgtgaagtctgattatagcgtttagccacgtaatcctgcattaattggcgcattgattcagtcagttgtgcctgaaagtgaagcgtcgcctcatttttatagaacactttaaaagcagcttgttgttgttcaacatattcaaaaagtgcctgtaaactgacctgacgatatgtctgatcgaccactacagtcacttgctgataaaaatcggccaccaaatcggccaccgcggttcggatgaaatccactttatcttcataatggagataaaaggtcccgcgagtaattgccgcttgcttggtgattgcttgaatcgaaatcccctttggtgtactgtctttcagcaagataatgagggcttgacgtaattgttgctttgttcgttgaacacgtggatcttgtgctcgtaaatctgtctcacgaaccatctgatagttcccccaatcttttaattaaattcacctgtcaatagtatagccgctcagtgaaaagtctgtccattaatcggcttgataacggcccttgatcagttgaatatcccctagtgtacactgtaaatttgaagattctgttaacgaacacccaaaaagtaaactttatctcccacaaatttaattgttgttcgtctgcggttatagtaaaatgagcgtagtatttcaaatcggatagcgttaggtggtcgtcactttgatttctgcattcttcattattttcatttcaatcgttttattcgccgttattgctagtcaattgactttcaaaattggcttaatcacaaattgcgtgctctttatcattttagttggtgttgatgcttatctattcagctggggtagtggttctcactgggtatacgttattgtcagcctactcggattagtcgctagcgaattattattagctgaactcccccatcttaaataattagtataatttttcaagaattaaaacaaaactgggttgtaaaagtccgattgaatatcgaatttttacaacctagaaagctgcttaaagtttcgtccaatatttggggttcacttcaaacgctgttttttaatagccggctgacaagtctaccggattgacggataattcacctttgtctaaataactgggtaaattttgatcgaaaattttgaagagccgttcatggatatcagcgatgtaacctgaaatatgtggcgtgataatcaggtttggtgtggcccataatggtgaatcacttggtaatggttcgttttgggcaacatcgattgctgctcctgccaaatgaccggattgtagatagtgcatcaaagctgcttcgtcgactgaagcgccgcgccctaaattgaagaagtaagcccctcgatggagttgcgtaaaaaaggtggtgtcgaagaaccgattggtgaccggtgttaatggcatcacattaatcacgaagtctgcttgtggcaatgcttgttcgtaatccgtgtcggttagaatctgatcaaaattggcaacgggtttctcgtgccgattaacgccaattgtgtgcatacccatgacgtgggcatactttgcaatttcctcaccaatttgacctgttccaaaaatgaggagtgtgcggtgttccaaatttgtcatttgttcaccaatagcatgatgctcccattgatgcgctgcttgtgcgggtaagctctgataaatcccacgggtaaagtgtaatatgtaacttaatgccgtctgtgcgattggttttgcgtgcatcccgcgtgcgtttgataccagtaccccttgcttagctaacgtggctagtggtaaataatcaacccctgagcttgcggtctgaatccattttaattgattaccgggctctgctaaaattttcgggcctacatctttattccaaccaaacataatctcaatactacccagttgacttggttttaaatcagctaaagcgatgattgttaaaccttgtgcagttagtgctttgacgtgttgttcaggaattgtttctgctgataaaatgactgtcaagtcgatccctcaccttattattgaagtaatctttattataagggattttcagtaaataaaaaagcattaccgactgaaaacggcaatgctttataaaaaattttattctttttctgcacgtggccatactggacgaccccagtattggaataaatcagtttgaatccgaccattatacaatttccggcgtttagttgcgcgttgcccgaatgattcttggaattgtaagtcacttgttaaaatatacttactccaagtcttcaatgaccgataggtatcacccatttctttatacaaagcacgggcttgtgtttggtcacttaatcgtttcccgtaaggagggttggcgatgatgaccccgttggttaaatctgtcttgaaatccttaacagcgagttgtttgaactggatatcatgtaaaacaccagcttcgttcgcattcaacttagcgatatcaatcatgttttgatcgatatcataaccaaaaatttcaagtggttggtctttttcggctgctttcgcttcggctttggcattttctaaaacagaagcatcgatccaatcgaagtcttcaaaggcaaacttacgatgcataccgggtgcaatgttgtgcccaattaaagctgcttcgatcgcaatggtcccagaaccagtcgttggatcaacaaatggcatatcaggttgccaacggcttaaaagaattaaggatgccgcgaagttttccttcaatggggcttcccctttttcaaggcggtagccccgcttgaataaactaggaccagttgtatctaagctgatcgtcacgacatcttttaggatgctgacttcaagcggatacgttgcgcctgtttcagctaaacgtgttcggcggtgatagacagtacttaacttatcaacaatcgcttttttagtgatggcttgcacgtctggttcgctatggagcgttgaacggactgagcgaccagcaactggaaaagcggcgtctaatggcaggaacttgtcccatggcaaagctttcacttgttcaaaaaggtcatcgaaggttttggcctcaaattgaccaatcgcgattttcacccgatcagcactgcgtaaccagagattggtttttgcaatatctgccacatcgccttcgaaatacacccggccattatctgaacgtgtttcataaccgagattttgtaattctttggccgtaatggattcaatcccactcgccattgttgcgtatagttggtaagtcatgtttttaaagatccccttaggaaattattttttaaataaaaagagcttgggcaaaagcccaagccacctgattgtaaacctttataggccatgttttgttccagaacttccccaggaagaaagttccttcagtaatcatctatctgttcttacgaactctcatttttagttcatttccataaatgagacgcccctaccaaagtttgggttactcgctcgcggggtttacctcgttccaccgtccaagtttccaaggacgctccgtcactgtggcactatttaaggatattcacgcatgaccgaagttttagcgctttttccgccgttaccgttaaggtaccctggcttattgggccaggcacgaacactacaagcatctcagcctgtgcgggcatggaccttcctcagcctaccgatgtagaccgcgattactcaagatttacaaatattgaatcaatgtttataagtatagcacaagattaaagatttgtctcgtcaaattgtgaatgattttgaactcttgtctgtggagcttgattttgttcacttaacttagcaccgaacacgtggcgttcaaggtttgataagcgtttcaaaatatcatagttggttgctgctgaagcttgttgtggtgcactttccttcacgttatcagaagcgctgagttggcggtttaattcgtcaaccttcttgaataagcgggcattttccgccgttagccgatcgattgcttcttgataagtttgatagtctttaataactaaatcaaggtaaccatcgacttcttcaggttcatagccccgcatttttgttttaaattcttttttcaatatatcagttgggttcaattcgatttcaatttgattgtccattttgacacctcatttagaataaatgtactatgattcccattatagcaaagttatcggataattaaaactcttgctgatctaattccgctaactcagtcgcgatatcttgtagttcgaaaaaatcgaccaagttaatcggataatcttgttggtcttgatattggcgggctgcatgataatcatattctggtttgcccggtgattcacgatcatagtataatagttgaccatccgtatgggtcagcatgaattgttgatactggcgcaattgttgcggtccagaatacggtgcgttaaccactggttcgcaaaaatcgactcgcgctttgagctgactcaattgagcttggttattttcgttccattgttgaccaaaatcattaaacggcaacatcatcgccaattttaaatccggatagtccgtttttagttcaatagcaacttgcagactccactgttcaatccccatttggccaccagtgatcacccactcgagcccatcatctaaatattgtgttaactgcttttttaatgaatatttaattactttaagtttctcgtcagtttcgccaaaaacaccgagttcatagcttcgatagccgctcacccatagtcgtttcaagtcaggtccctcccaaatgattttcaattaaactaaacattgctataatagtgaaacaggagtgtgattttcaatggcctttcattatcctaacggacagccttatacaaataatgagacaaaaccaactaaaaagcaagcccggcaaccagaagcaacaacgttatttggtaaacgcggcatgacgttggaagaagaactcaatgatagtaatcagtattatcgattacatgcaacggctgtcgtgtataagaaaccaacgccaattcagattgtgaaggtcgactaccctgcccgcagccaagcggttattaaagaagcttattttaaacaagcctcaacaactgactataatgggatttatcagggccgttacgtcgattttgaagcgaaggaaacgaagaataaaaccgcgtttccgtttcggaacttccatcaacatcagattgaacatttcagagcctgcttgaatcaaggtggcatctgctttgtcattatgaaatttgtcccgctacaacggctattcttgtatcccgcaacagaactgattagccgctgggacgcgcaagttgatggtgcacgaaaatcgatttcactcagtgatgtgattgacaatgggattgagattaagtaccaacttaatccaattattccctacttagatgccgtagatcagttattaaagcggtcaaataaaggagtttaaagaacaatgtccgataatcgaaacaataataattcgcgagttgcaaggcacaaagctgaagcaaaacccgctaataagaaacgccggcccctctttttaagaattctaaaatggctgttactactgattgtagtggctttcgtggctgggattggtttgtttgcctactatgttaaagatacaccaaacctaacgcaagcggacctgcaaagtccgaatgcgacaattctatacgatgatcaagggaaacctttcaaaacaattggtggcgaaaatcggagttatgtcaagagtgatcaaatcccgcaaacattaaaagatgcagtagtctctattgaagatcgtcgtttctataaagaaaaattcgggattgatccaatccgaattgcgtctgctgcagtcgccaatattactggtaaatcaccgctgggcttacaaggtgggagtactttaacccaacaattgattaaactgtctaaattctcaacgaaaaacagcgatcagactttcagacgaaaagcacaagaagcgtggcttgccgttcaagtcgaacgtcaatattcaaaagaccaaatcttagagtattatatgaacaaagtgtacctgaataacggggtcaatggtatggggacggctgctaagtattattatggcaagtcgttgaaggaattaagtttgccacaactggcattgattgcgggtatgccgcaatcgccaagtaattacgatccgtacctccaccctgatttagcgaagaagcgccgtgatttagttcttgatgcgcttttgcggaacaataagattacagcaactgaagctgccgaagctaaacaagtcccaattaataccggcttagtggatcaacaaacagtagcgaatagttcaacggattctaaagcaaccgacgcttacgtcaaggaagtcctcgccgacttgaagaaaaaaggctatgatccgtacacggctggtttgaaagtctacaccaatatcaatatggacgcgcaacgtaagttatacgatatcgtcaataatgatagcagtattccattcccagatgatcaactacaaacagcagtttcaattacagatcctaataacggtcgaattgttgcgatgattggtggtcgtaaaactggtgatgtgcagctcggttataaccgggccgtgcaatctggccgaagtaatgggtcatcaatgaaaccattaatggattacggtccagctatcgaatatcttgactactcaaccgcacagaaactacaagatgtcccttacacttatcctggaaccaatattcaattgcataactttgatggccgttatctcggtacaattaccgcgcgtaatgcgcttgccaactcacgaaacgtcccagccatcgaactgttagaagctgttggcatgactaaagcccgtgaattcgtgaaaggcttaggcattaacgtgccagctgatactggtctttcttatgggattggtgggaatgtttcaactgttgatgaagctgccgcatatggcgccttcgcaaacggtggaacttactatgcaccaacttatatccataaagtcgaaacagccgatgggattacgcataattatgattctgatggcacacaggctatgaagagttcaacggcctacatgattactgatatgttaaaagatgttattaaaaatggttctgggacgttagcccaaattccagggcttcatcaagctggtaagactgggacaaccgattattctagcgaagaaattgccaaatctgggttaaacccaactttagcgaaggatagctggtttgccggttataccaagaactattcagtgacggtttggactggatacgatgaaccacttaaaaatggattaacaatgagtgagcggaacgtcgccgcttatatctataaagcaatgatggcctacctcgctcaaaacgcaaccaactcagattggtcaatgccaagtaacgtggttgctaaaaacgtggctggcgtacgagaactctatattaaagggacgacgaccattccaagttcttcaagcagtcgatcttcttcaagtagtgtactctactctagctcagaagcaccggtcagctcaagcagtgaaatttctagctcaagtagcgtggttgaaacaccaagtgaatcttccagtgtgccggagacctcatcttcaagcaccccaactgaaagttcacaatcgcaaccttcgacctcaacccctccggcaacaactaatccaggaacggggtcgacgacacaaacaccagcagcgccaactaactaaaagaagcaccgttcagttcaacgataaacgttggctgaacggtgctttttttgcgttttttaaccacgatcttcaagaaattgttggcctgcttggcaaatccttaataagggacactcatcgcaatgcggcttacgtgccgtacagacttgccgcccaaaaagaatgagtgtgtggtgcgcttgaacccatgttttcttaggaagcttcgcttgaaagtccttttcaatctggatcaccgaggcatcctgtgcactgattttgagccgtttggcaatccgagtgacatgcgtatcgacggcaaatgatgggacgttaaaggcgtcacctaaaacgacattcgcggtcttacggccaacaccagcaagttgttccaattcggcatgtgtgcgcggcacttccccaccaaaatctgccattagttgctggcagcatgttttaatgtgtttagctttattatgatataacccgattgaatgaatatcagcctcaatatcggcaatctctgcattcgcgaaactagctggtgtcgggaaatcagcaaatagttgtggggtgaccttattgacggaaacgtcggtggcttgtgcgctaagcatcaccgcaatcaacaattgaaacggtgaatcagcaactaatgcgccctgcgcatctggaattaaattgtatagttggtgcatggcccactgtgttttggcttttgataacatccgcttcatctcctattcgattaacgtcttggatgggccttttggtaagcttgtagggattctttatcagtaatattttgtttctgccagttgagcaaaatcttatcaacgtacttcaaggaatagacttgatttaaaacggattctcgcacggctaattgaatcaattctggttgataatgatctaaatctaaccagttggcaacaatctcagattccaatggcgataatgggcggccaagagcttgttcaacttggttaaagaccgcactccgttggttaccgtctagtgcttgttgagtgacttgtgcgtcttgaacggctagcacgctcaatttagttaaggctggtgtgagatcgtaatggtcttcagccttaccttgttcattgacagatgatttaagggtaattagttttttctgtaaaagttgatgaatcaatgcgtaaatttggctggattcaattcccatgcgttcaccaatcacagctaaatcgggaaagtcattgttttgactggcaaaatcactgagctgtaagtaaaccactaattcttcagaagacatcttgagcgtttgatagtgatgcagtaacagtcgagagacactcaattggccgccttgtaaaaacgcggtaagttcgttcatattctagccttcttttctaaaagtttcattagttctattgtaaccaattttagacaaataaaaaagcgccgagaacctgatttcggttcacggcgctttagttaatcctcaaagccaactcgtttgagtcagcactctgatttgaaacatgcttttgaaagtagtcctcggtgctttgctacgtccagcaaacgatcgacttgcgtcgctcattcactagactagacaaatgctcgagaactaaccactttcaacgcactctaattcaaacgtgcttttgtagctaggttcctgcgcttaacaatgattgtcaaataatcgattgcatcgattattcgccaaccaacgttaatgctcagaacctaaccagctacaacgcactctatttgaaacgtgcttcttcgaactgccttttccggttaactgtaaaacgggcaccatggctgtgaagcgccataatgcccgttttgctgttaatcctcaaagtcaactcgttcgagtcagcactctttatggtttgattctgttaatcattcttgggaatggaattgtttcacgtaaatgatcgataccacagatccatgtaatggcccgttctagacctaatccgaaaccagaatgtggcactgatccgtaacgacgtaagtctaagtaccattgatattcttcaaggtctaagcccattgctttaatttcagcttctaatttatcaaagtcagtttcacgttcactaccaccgataatttcaccataaccttctggtgccaataaatcagcacataagtaaacatcatcacgtgttggatgtggcttcatatagaaaggtttgatggcttttggataattcaaaatgaagactggttgttcaaattgatccgataaataagtttcatctggtgcgccaaaatcatcgccccatttaatatcgaagtcagctgcttgtaacatttcaacagccttatcgtatgaaatacgtggatacggtgttttagtatatttcttcaattggtcaacatcacggtccaataattttaattcataggcacagtgatcaatgacgttttgaacaaggtaagccacgtatttttcttggacttcaagactttcatcttgagttgtgaaggccatttctggttcaatcatccagaactcagtcaaatgacgacgagttttggatttttcagcacggaaaacaggaccaaaagtgaagactttgccaaaggccattgcgccagcttcagcgtataactgaccactttgtgttaaataagcatcgttgtcgaaatattcgatgtggaataattcagttgtcccttcaggggcactacccgtcaagattggtggatccatcttgatgaagccttcttggttaaagaattcataagaagcgcggatgatttcatttctgattttcatgatcgcaaatgggcgttttgaacgtaaccataagtgacggtgatctaataagaattcaatcccatgttctttaggtgtaattggatattcgctgctgtcaccaattaattcgatgtcagaaatttcaatttcataaccaaagtgtgaacgagtatcttcatgaatgacccctgtcacccacatacttgattcttgtttgacatcttttgccaattggaaaacggcttcgcttacttggcttttaacgacaaccccttggaaaaaggcagtgccatcacgtaattggaggaatgaaatcttcccacttgaacgtttgtcggttaaccaaacgccaattttaacttcttcatcgacatggttttttgcatcgataatactgatttttttaaccataaactctgtctccttatgtgcaacatttaatttacaacagttcaaaataactgatagttattattatataacaaaaccctgacaaccacagccccctaattgagaaccctagatattttcaatcaattgaatcgtcttcccggttttaaaatcgagggttaaataacaaagacggcctttgtcacttttatagacaacttcccaaacaggcttgttgcggtacataccgaagttaatgttcagtactttttgcggatttttaattgaccatgtcttttctaacgcatcgtttttagaaataccaccactttgacgatagacagtggcatgattgcctttttcgttgattaaaacgaagatgccgtgattatcacggtctttaccactaacggtataatatgttgcatttcgatgatacgtgtagaacccatcaggctcttttaatttcgcgtattttttagcaatgttaacggctttggtttcagccgttgcttcgggttttcgagcttgatgataaatcatcagcatgctgccaatgattaccaacaataagaatatccagagccatctcttatatttgcgcacgctgcattctctccttgttcgcttgaataagccttattatagcaaaaaataacggctatcggcgcttaaaaccgaatcttagtgggaatttaaccaaaacaagtcggttaattcccggattattttaaccgacgctgctttttggggcaaacttgtcggtaacgcgcggcgcatttgttgcccatattgggtcgataataaccggggatctaaacaaatgaagacgccgcgatcgttaggggttctgattaagcgcccaaatgcttggcgtagtttaatcgttgcttttggtaaagcctctgctttaaatggattaattccttgggcagaaagttgagcgtaacgaattcgtgtctgcagtgcattcggcgcatcaaatggtaattgaacaagcaccactaattccagtgctgattccggaaaatcaacaccagcaatgaaactgcttgtcgccaacaagattgaatcgtgccccagcataaagcgcttggtaattttctccgcactacccgtaatcccttgggcaagaatctcacgatcaagcgataaaccggcgcggccaagcgcataatacacttgttctaacgcctgattagaattaaagaggactaacgcctgatgcggattgccaactaataacgttaatagctgttcagcaactgcatgatggtactcattgggggctaaattcttttgactaggaccatcttcagcgataaaaaagcgcgcctgtttcttgaagcggaatggactgcgtaatttcttagtcgctagtggttgcgcttcggtaaaaccaagttcacgtttcaaataatcgaagtgcccattaaccgcaagggttgcgccagtcaaggtgactggttcaaagtgcgcgaggatctgttgcatttgcggaccagctgaaagcaattgccactggagcttaaactgtggtaactgactaggttgtttaggctgtgtcatctgaatcattaacgcgtgttgttcctgcggtttcgtcgcaatgaataattgctcaaaccgttgataggcttcaacatccgccaacaataggttgatttcgttttcaaatgactgccaaatccccaaatccccctctgtatattgttctaaccgctgttcaagccagtaacgcaacgcgagaaaatgatcttgaatggtcaacagttggcggttcagttggtcgaattgattatgacaagcggtgacaaattgaaccacttcatctggattcaaataacgttcactaaacgcttgatgcgcttctggttgcggtagttcaaacgctgtggttaggtatgtctctaagtcactgatggttcggcctaacttggttaagtttttatgcactaaccgtaacgagcgggcttgcggtgattttttcgggaaaagccgggctaaattattattggcctgttccggatccgtatattgcaaccctttttgagaccaaagttgccaacgtgaaagtgaccaatcttgttgcgcaattttttgaacattgaaaatcatattttgtgcttcatctaagaccaagtatggtcgcgcaccccaggtttggtgatcattcgcgtgctctgccaggtaggcgtggttggtgacgagtaattcggcttgttgctggcgcttatgcaggcgacgtaagaaatcatcttgataaaacggcgcttgtggttgcagacttgttaatccccggtgttgcacgttattgaaaaatggtgtttggtaactcgttaaattgagttcatccaaatcccccgttgttgtttgggttagccaaactaagattttcatctgaagcaaccgcaccatccgattcttatgtggtaaacggagcgataattcaaagcgatgcaaatccaaatagtgacgcgggctcttaacgatttcggcattaatttggcgacctactaatttttcaagaagcggtctggcctgcgttaaaatctgatcctgtagcagcgttgtcgatgttgcaaccactaatttgtgttcaggcgtcatgcgataactataggggagtaaatacccgatggtcttccctaacccggtggctgcttcaattaatagtggttcaggtgcctcagattcgaaattatcgtgaatcatatccatcatggcagcttgcgctttacgccatttcaagtggggttttaataatcgttttttatcagcttcttccactggataatcagccgcaaaattagatcccggatagatttcaaatgattcctcggctggttttcgtagggcaatgttttcacgaattaagagatcgttcggcagcggtctcgattgcgcatgcatctgctcggcaatcgctgtgaagaaatcccctgtttgacgtaacaagcccgcgcctaacgcactaagacgttctagggtaactaatggcagggtcttcagccgtgccattaattttaagaataatttagccgttaccaaggcatcgctgtcagcttgatgaggattgtcatgttcgatggcgagtaactgtgtgaggtcttgtaatcgatagctcggtgcttccggcaatacgatctgagccagttcaacagtatcgatgcccggcaaatcaagtggcggttgccccacgcgttctaattcgccatttaaaaaaggtaagtcaaagttaatattatgggccacgaaaacagtaccggataagagttcaactaacgttggcgctaaatcttcgaaaatcggtgctaattcgagttgatcagcagtgatatgcgtcaaatgttgaattttagtcggtacgtcgcgaagcggattaacatcttgcgaaatcgtctgaatgattttgccattttgaatgagggcgcatccgaattgaataatgcggtccccttctttaatgtttgtgccagtcgtttctaaatcaacgacggcgtaaattgtctcttggttcatgctgtcaccaatactttactcattattatatcaatcatactatgaatgacgcgtagaaaccagtctagttaatagcgactagttggccaatcgacaatagatagagatatttagcggttaccggccggttagcaatttgcgtcaacgcggcactgtataggttaatttggccggcataccgcgctttaatcgcctcaatggcagcttctggatcagctgggttcacaaaatcagtcttatagtcgaacaaaatacagtcggtatccgtggttacataaccatccataatcccatggattaagacattgtcttgatcttctgggcgtaaaccggcgaataaggatgcagccggtaacaatagtgaaaatgggacttcccgatgaacttgcgctggttcagctaacagttgctgacccaactcgctctcgaagaatgtcatgatagcagcaactttaatttgttgtgcaacattggcagtgaggcttttttgtaaaacaagtcggtcgatgacactttgcacccgatcgatcgttactggttgggttaaatcgatttcttgtaagaccagatgcgtcgccgttccaatttcagccggactcgcttttcgaacagtctgcatgaattgtggttgaggtaattcatcggtcacgtaacgatgggtttgttgcggtgtatcagcgtcaaagcgtaattgccccaactgatcattgtcgggatcttcaaagagccgtttcacttctgaaacagactggtaagctgtcgttttggtggcgccttttgctggataactgaatgttagctggtcttgaatcccgttggctaaatcagttgttaaatcgaccgccttgagtgccacttgttgttgctggctccaatcttgatcatggtgtaaagcacctggtaattcgccaaggcgcgtttcacttgtaaacgttaaattaaattcagttgcgtcatcgctcagaggtaggaatggtgtcccctcttcggtccaatcacgggcttgcggatgacgaattaagctcaatccaatccaatctagtaagttcgtgctagcttgacgaacagaagcgtccaaccgcagatcaggattttgctgtcctttttgccaagttgcaaatagtttcgcttggttatcacaactgcccgcgataatcagccgttgctcggcacgcgttaaagcaacatagagttttcgcatttcttcagcgcgtaacttttgccgtttttgggtcgtgatggttaattctggtagtgttggaatctttaaccgttttttcgcgtctaagtaaacaattccgagtcccgattgatcatcgagcacgtaattttggcgcaagtcttgctcgttaaattgatgattggcatccattagaaagaccaccgggaattctaagcctttactcccatgaatcgtcatcacagagatggcatcttgattggcgagactggttggttgggctaaatccttatcttgtttttgcaaacgttcgataaattggatgaactggaagagccctttaaagccgtttgcttcgtaagtcgcagcgcgttcatagagtgcgtgcaagtttgcttggcgttggcgacctgctggcatcccaccggcgtaatctaaaaagccggtcttttggtaaattgtccagattaaatcaacgagtggccgttgacgtgcaatggctcgtaactcatttaataaggtttggaaatgcgttaatttttcgaagacttgttggccgagttggccggatttttgtgcttcgaactgatcaagataattaaaaacggcttggtaatagtcatccgttttatcattaatccggattaatgcgagttcattttcgttcataccgacaattggtgaccgaagcacgctaaccagtggaatatcttgattgggattatcaataattttcaagaaagatagcatgatttgaatttccgttgtttggaaataattctgcgcatcactaatgacaatcggtaagccgaaccgttggaaataatcaagaatgattaggttgttgttgcgcgttggcgtcaataagacaatatcttgatagcgaattggccggatttcttgcgtatcccgatcccagatggtttcttgattatcaatcattcgtttaattcgctgtgcaactgatgcaatctgaccttcagctttatcaagcttgcccgttgattcttcatcagtcggttttgtttcgtataaaagtaattcagttggctgagttggttgatcgtcaggataataagtcgcaccatattgcaattcagcgttgtgatcgtaatctagctgccctaattggcggtccatgatttgtttaaagactaagttgacgaaatcatcgatattacgccgtgaacggaagttttctgcgagaataatgcgttcactatcgttatctggcttggcgaattcgtcgtacttaccgaggaacaaactcggatcagctaatcgaaaggcatagatggattgtttaacatcccccaccatgaagacgttgcggggtgcttgactagcgatagtttgaatgattgtttcttgtaactggtttgtatcttgatattcatcaaccaggatttcactgaatttattttgatagaacgttcgtgctgcctctgattccggagtgtcaccggccaaaatatccaaacagaaatgttctaaatcgccaaaatctagtaaatagcggcgtttcttctcagcttggaaggcttgcttaaaatcgcgggtaaccgtcactaacttaccgactaactcaccagcgcgccgttgaatctgactggtttgtgcttcgtcaaagacaaaataggttgttaaaagatcgtttagtgcccctttgacattatcgagggcgtttttgatccggtccttgtcatattgttcatcgggttctaatttcttagttcgtttggcgggtcccaattgggcgtcggtcaattgtgtgcgccactgcgcccaacttaaagtggccgcgttggcttgaatggcagttagtgctgcttgtgccgttgcgatagttggcaagtataccgcaaatttctcgtttgtttgacttagttcgttggcgagtgccaagtcttttaaacaggttgccaaggtcgcttctaactttggcagaatcgttgttttgaaataagcactggttgttaggccagtctctggtacctcgtaaggggcggttagagattgtaaccattcatcgggcgctggattggcaccagagaagttaaacagttcgaaaacaatgttggttagcccatcatcgttgcgatcgttcgaaaaattttgcgctaaatcataaaataaggcgtcgtttgactggtaatgttcttcgcgaacgcgttgccaaacttgatcctctaataagagacgttccgcagtatcacttaataaccgaaacgcgggatctaacttaatcacgtagtagaaatgtttaatgacttgtaagcaaaacgcatgcaacgtgctgatttgtgcggtcgggactaggctgagttgctgccgtaagcgttgttgcaccgctttgtcggttgcctcgcttgctttttttcgcagtgccgtttgaatccgttggcgcatttcagatgcggcggcttcggtaaacgtcaccaccaatagtgaatccacatcagtgccattcaagattttttgaatcacgcgttcaactaaaacggttgtcttcccggagcccgccgaggcagaaacgaggatatcatgccccgcgtgatcaacggctgcttgttgggttggtgtaaatcggcgatcactcatgtcgttcttcctccgagttcataattttggctaagacggcttgattatcaagcgcacttaattggcgataattattttctggtaacatcgcatcgaattggaaaatcgatttatatggcgacattgtgagtgcattcgtgcggtcgggccgcataatcggattcaaagcattttcgccagcaaaaatcgcttcccccgctgctttgattagttgatcgttatgggcaattaattgctgtaactcatcaagggtgaccagttgtttcgatttgaatgccccactctttggacgattgaagttaaacagtggtgaatagccactttctaaagctgtatccaagttttcgagtaaggtctcatcgtttaaaattaagccatcatacttaaattgatccagtaataattgatcgagttcgcctttttgtagttgagcgagtttttgtttgttcagttgcttcaatgacattgttgggttttgaaggtgcagataaaaggccccggcaggttttaccttgctttgcgctggtaaaattgctgcttgatcttgcaagacagtttcaaggtatgtcaacatttgcaatgccaaaccatagtatgcatcgcggaagctaaagctgtgttgactggatttgtaatcaacaattcccaggtaggcttggtcgtttaatgtcagttgatcgatccggtcaattttcccccgcaccttaacccgacgttgattgggtaattcgaattctagaccagctaatccttgttgggcaccaacttggccgaataagacttcggttgccaacggttttaagttcgttcgttgactctgatcgcgcaatgtccggctgacgcgtttaattgtttgactcaattgttggcgaatgtagcccattcgtgctgatttattgaggatcttaaattctggttgttcatacgctttttgtaagatttcatccgtcaatgcatcgatttgttgattatcgagatcgggtaagactaagcgttgggcttgaatcatcttgataaattgatctaagacttggtggtagaaatcaccggtatttgcaggtgtcagttcaaaaattgggcgctcgttcagttttaagccgtattttaagaaataagcgtattgattttgatagaactcttctaatttcgagatcgacgtatggatttcattgccatataacccagtgacaatatcgcttgtcagtgcaacgggttggttatggtacgccagactttgaaggagttgattggttaagtagtgactaacaggaaattgttgtaataaacgataaacagtctgccattggtcaggaattagtgtttgcgtcgcttgtgcttgtcgcgcaacttgaatcaaatcgcttaacaaactacgccaagaacccgtaattggcgctgtacttgtcggaatgacttctgctagaacgcgttgctcggttaaatggaagtagtttttaatccggtcgacatagggggataccgtgtagttcgccccttccccattattcaatggataagtgaaatacaatccttcagtaccacttaaaaaggccaagtagttcagataaggttcaaagctcatctgactggcacttggatcagttaagaattgttctgaattgaaccgatcggttaatagttgccgatcatggtcggataataaggcgctggtttcaatctgatcaggcatcacttgatcggtcgcaccaatcataaaggtaattttgcggcgtttagtctgcaccatccctgattcagataaaacgacctggtcgagtgtcgatggaatttgcgcatattgcgccgtattaaacccggccgctagtaaatcccaaaagccctttagttcgaaaggttggtcgcctaataacgtcacatattcatccaacatcgtcataaatgtttgccatgtctgttccggttggccagctaaggcaatttgattggctgcgagtgcttggtcccgccaatttaacaattgtcgatcgacaccttgttcgattaagaattgatagagcactttagcggcatcgcgccctgttttggcactgtctaaccgtttataaaatggtggtaatacggattgaacataatgccgaatccgattgatccgttccgtgagcacttcatcttctgttgttcgaacaccatcttggaaggaaccgaaccgataatattgccaatcggctgcgcttaaccaatcatgcccttcatacccactttttaaaatcagattttcacacaaatcaagatcagcccggaattcagcgactgattgatagtcatctggtattaaaagctccgtcttcaaaagcgccattacatcttcatagcggtagtaatgctctttcacatcaaacaacgctgccaacatcgcaacaagtggatgggccgccattgtttccggtaaatcgcagaagtacggcacttcgtattctgtaaaaatcggcgcaatcattgtttcataaggggctaaatgccgagtcataatcaagaagtctcggtagcgatagtggccggtttggactaaacgacgaatttcacgggcaacataccgtaattcggtataccgattttcggcaccgatcacttgaagttgcgtcgaatcgatttccggtgctgttgggatctgaccgtggttttcagaagcaacccagtaccgatcaagcgcgagtaacgttggtgaaacccgctggttagtggcaatctgatcagtcatgatgggaatgtgattttgcttggcctgttggtataattgataatacgtacgctcagcttgataaaagaagctgagtttttccggtggttgttggtaattaacatagtcggtaattaaggctacggttaagcttgcttgctgcattaagacggcgactagcgcttgttcttgagccgtgaattgtgcgaaaccttcgatatagaaatgacaatcgtgtaagtcttgtttttttaaataatcagttaaggcatcaattaacgtcgtattttcgatgaattgcttttgcatagcggcttcaaacgccgtggcaataatggttatttcccgcaatttagtagtcagttcgacttcttcgggcgctagctgggccgcaatctcagttagctcatcgggtgtaatacagcccactttaagttccaatagttggctcgttaattgagcaacaaagcctgtttgattgacttccccaccaaataagctgagttcttctgcatgttcttgcaagaggcggtagacaaggatgtttaacccggcggttgaaatccgcggaatctggtagtacggggtatttttcatgaaataccaagctaatcgacttaatgagaagacttggacgcgtgaggttgcgacatactcacttccaggggtttttaggtcatttaaaagtgcgacttcagattcaaatttgatatgattcgggaccaaataaaaaaagcggtccgtgttggtggccttaaggtctgtttgtagttgcttgactagtgtttgatggtggtcataactagctgtaccaataataaattttaagctcatggcgcccacactcctttggcgtcattttaccatagatagacaagtgattgggataaaatccggctagtccgttggtaaaaagcgggtataataggaaacccattaacctgtgcccaatttgatttatgtggcggtcatttttgttttgcagtatagtagtaagggtatcttcaagtcagaaaaagagattaagggtgattgtatgcagactggtgttggccaaagtcatgcgaaaattattttaattggggaacacgctgtcgtttatggacaacctgcgattgccctccccatctttgcggttcaagcgcgggtaacggtaactctcgagccggcactccagacaccgcaaattaagagtacttattacaatggtcctctagaacaggctgttggtcagatgcaaggcattcgccggttaattgaacaactgtggcatgcattagatccgaacttaaccccgtttgaattgacgattgaaagtgacttaccgcccgaacgcgggatgggttcttcagccgcaacggccgtcgccatcattcgagcgttatttgcgacttatcatcaagagctcagtcaacaacggctgctaaagctagccgcgctctccgaaaatttaatccacggtaatccaagcgggattgacgccgcaacaaccggcgcaactacaccattatggtttgtcaaagggcagccgcttcaacccctacccattaatttaaaagggtatctcgtaatcgccgacagcggtcaaaaggggcaaacaggtgccgccgtcaaaagcgttcagaatcaaatgatgtccaatccagaacaaacgcaacccttaattgaccatttgggttatctaacgcaacaagtcgcaagaaatattgcccaaaacgaattaacggtacttggcgcgaacctcaaccgtgctcaacttgatttgcgggcactcggtgtcagcaatgcccgtgttgatcatttgattgatgtggctaatcagaccggtagtttgggcactaagttaacgggtggtggccgtggtggctgcattatcgccctggccgctacgcaaagtgctgcggatgatttggcacaagccttatcagcagctggtgccatcaaaacttggattcaaccactacacgcactttaaaaaagattaggagtattactatgggacaatcaattacagccagagcacatacgaatattgcgctcattaagtattggggaaaacaaaatccggaattgattattccgtataacagtagtctttcaatgacgctagatcatttttatacagatacaacggtccgcttttcaactgatttgactgctgaccaaattagctttaatggtgccattgcggataccaaaactagtacgcagatgagtcagtttctcgatttaattcgaaaacaggcgcatctgcctttatttgctgctgtggaaaccattaatcatgtccccaatgctgctgggttggcctcttctgcttccggttatgcggcattagctgctgcaggtagtcgtgcagctgggcttgaacttaacgatcgggatctttcgagattagcccgccgtggttctggctctgcaacccgctcgatttatggtggttttgtggaatggcaacgtgggaccaatgatttggattcatacgctgttcccgttcaagaaacagttgattgggacatccagatgattgcgattgtcttaaatgatcgtcaaaaagccatcgccagtcgtgctgggatggcgaatacggtggccacgtcgccctactacccagcatgggttgaaaccgctcaagccgcaattccggcaatgaaggccgcaatcgttaagaaagatataaatttggtggggcaattagcagaacaaagtgcgatgcagatgcatgcgacaacccttagtgccgtcccacctttcacctattttgaacctgaaaccctacaagcaattaaagtcgtgcagaccttgcgccaacagggtgtttcttgctattatactatggatgctggtccaaacgtgaaagtgatttgtaccagtcaggaaacacctcagattttagcggcgcttgcgccctattttagtcctgaacaactccttgttgctaaaccaggtcctggtgtgagctatcgataatgcaaatttaagttaaacgtgaaaggttctgatggtttgataacggctaaagcgcccggaaagctgtatattgctggcgaatacgcagtagtagaaacaggttttccggctattatcgtggctttaaatcaatttgtgacagtcacaattgaagagagtcatgaatatgggagtattgtgtctaaacaataccaagaaaattccctttattggcaacgacaaggtgatgaaatggtttttgataaccgcgataatcccttccattatattttgtccgcgattcgcttaacggaacaatacgcacgtcaagcgggtaagacattgcgcgtctaccacctacgggtaaatagtgatttagactctgctgatggtaaaaaatacggtttaggcagttcagccgccgtaaccgttgcaacggtaaaagctctctgcgccttttatgaattatcactatcaaacgaccaattgtataaacttgctgctattgcgcatttagatgtgcagggcaacggttctttaggcgacattgctgctagtgtttttggtggctgggtcgcttatcggtcatttgataaacaatggcttgctgacattcgaccaactgttagtctaacggagctgctcgaaatgccatggcctagtctttcaatcgaattattaacaccgccagcagagttgtcactcttgattggttggacggggtcgcccgcttcaacctcgcacttggtggataaaattgcccttgctaaaacagaacggcaagccgattatcaaaacttcctcgcagctagcaaagcttgcttagaagcgatggtcgaagggtttcgtcgtaatgatttagcccagatccaagctgaattacgccacaatcgtgccattttacaagatctcgctcacttcagtcacgtcgctattgaaacgccaatattacagaaaatgggcgcattagccgaggcaatcggcggtgctgccaaaacatctggtgctggcggtggtgattgtgggattgtcattattgatcgcgctatcgaaacagaggccctctttgaacaatggcgggccaatcaaattgaacgattgaaccttgcagttcacctcgtagattaggagcttacccatggtcagacccaaacaatccattcaatctcatcggaaagatgaacatgtctttttagcggaaaaattccgccatgatgatgccatcaatgactttgatggaattcggtttatccatcaaagcttacccgaaattgcggtatccgacgtggatatcagtaccgattttgccgggactaaccgggccagtcccttttatatcaacggcatgaccggtggtagtcagcagacaaagaaaattaacgcacaattagcgcaagtcgcccaaattaccaacctaccaatggcaactggctcccaatcggtagccattaaagatccgtcactagcggatacatttagcgtgattcgcgaattcaatccccacgggtttgtactcgctaatattggtgctggtaatgatttgaatgtggctaagcaagccgttgcaatgacccaagccaatgccctagaaattcacgtcaacacgccacaagaaattgtcatgcctgaaggtgatcaagatttctactggttagacgagattgctaacattgtcgccaatgttggtgtgcccgttatcgtgaaagaagttggttttgggatgagtgctgatacaatcgcgcaactcaagcaaatcggtgtgcaattcatcgatgtttctggccgtggcgggaccaactttgtcacaatcgaaaacgaacggcgtcatgataaagcctacgattacttagctgattggggccaatcaacggtcgaatcgctctttgaatcacgcgctttccaaaatgacgtcaatatcctcgcttcaggtgggattcggaatcccctagatatcgttaaagcacttcgacttggtgccagtgctgttgggatttccggtcaattcttgcacatggttttaaaagaaggcccgacacaaatggcggaaaacttgctcacttggcaagcgcagattcaagagattatggcaatgcttggcgcacgcgatattcaagcgctccaaaaggcgccaattattctctcgcctgaattacggcattatttgaatgaacggcacataacattttaagcagcaaaagcccggtagaaggatttcttctaccgggctttatttgattgcttaattagcaactacgactttgccaatcatttggttcgtttcgaccagttgatgcgcttgccgtaagttggctgctgaaattgggcttaagcactttgtcagggttgattgcaatttgttttgttccaataaggttgcaatctgtcctaagataatgccttgactcgctaaatccgttgtttgatagtaggtctttgagaaaacccactcccaagcgaactcgacccgttttttagttaatttttgtaaatcgaccgggcgatgattttcagtgattgaagcgatgcggccattgggcttaatcaggcgcgccatactctcccagtgttgatcgatgttattcaactctaatatataatcgaccgtttgatagccgagtgcgtgcacctgttcaatgagtgattgatgatggttaacgacttgatccgcaccatgggccagcgcccacttttgcgtttccggacgggaggcagtcgcaatcacgtgcaatccggccaaatgtgccagttgggtggcgatcgaaccaaccccacctgccccattaatgattaggatggtttgatcatgattagtggttcgatcttcaaaatcaatgtgtaatttctcaaataaagcttcccaagccgtcagcgctgtgagcggcatcgcggcagcttgcgcgtccgttaaattctgcggtgcttttgcgacgattcgttcatccactaattgatattcgctattactacctggtcgtttaaagtccccaacataaaagacacgatcacccggtttaaataacgtgacggcattgccaattcctgtgacaatcccaacagcgtcccagccaagaatacggggcgtttttgattgtcctctacccccttttcgaatgccaacatctacagggttaactgaaacagcggtcacttgtacgcataaatcgtgtggttttggtttgggactggggagattaaaagccattaaactttcttcatttgtaatcggtaaatgtttggtaaaaccaattgcttgcattaaaaatgccttctttcttattcaccattagtctaaaacattaattgccccgtaacaatcgtgtatcgaatgtaactagttacattgttttcactaggcaaatgactgctagcggactataatggcggtatcaaaggaggccatttcatggttcaagaacggcacatttatgattgtcaggcgggctgcccggttgaaagcacgcttcaaattatctcgggtaaatggaaaagtgtgattatttatcaacttttgcaacattcaaatctccattttgatgatttgacgcgcgctttacccgattgttcgcgccgcatgttagccctacagctggaagaattaattgcggatcatgtgattactaaaacggtgattagtctccggccgttaaagactgaataccaactctctgaatttggtcaaacactgagtcccgtgattaacgcaatggcaacttggggaacttattataatcaggttgcacaacaggatgttggatactgtaatttgcagtaatgcctaaatttggatattcggtagattgtaaaattaatccgaacgctgttcggacaaaaaagatcagcttcctttaaaatggaatgtatacaaaaagccctaccgtattccggtagggcttttcgttgtgtggagttgctattaatattattttttggtacatccttagtgtagcaaaacctgggcagcattccagttacaagttcagcgaattgtccggaaagtgaacaatatcactaaattgtttagtcacttttaacgatttgctcaagctgcttcaaattaaaacataaccgctcatcaatcacctccggttcggtctgcagattattttcaaaccaacaatctaattggcgaatgattgcaccgccgtaaaagtcttccaagtgatttaactgttgtggcgtgtattgtgctttgtaatggcgcaatgccttatgaataatctgtttcataacctgttcaaaaaagcggcggcgttccggataatccgctagatgatataaattcaagcaaaacatgcgataccgtgtaataaattgaacgacttcatgacagccagattcccagtcgccactcactatactctcatcaactttttgaataatctgttgttcaagtgtccaccgaaataagccgcacatgcccgttggaaaatgattataaaaggtcgttcgtgataaattagccgttttcaaaaaagtcgcgaccgtcaatttcgccactctttgatccattaataattcgattaaaatcattgccatatagcgcttagtcgcttgtcgtcgtgtcatttacccacccgttctaattactattgttattttaccaataaacaatcattaacggtaatattattaacaaagattaattttatagcaatgaaaacgttatctaattattatcgattgcacaaaaaaagcggtgcgaatttgatattcgcaccgctttaacacattaattatttttctaaaccttccgcaactgcttctggatagttggctgtgacaattgcagcacaacgcgcacaaagcattgggaacttatcatctgaaccgatatcagtcttaatcatccgacaacgatcacaaacgtccccctcagcatgcgcaacactaaccgcaatgccatcaaattgtgtggcttctgctgggacttctgagttttgatccgcaattgttaattgtgagacaatcaataattgtttaacatcagcatccaatgaagctaataaagcagcattggcttcgtttggataaagtgttacggccgcttctaatgacttaccgatgaccttgtccatccgggctgtttcaagagcttttaagacatcgtcacggatccccatgaaggcattccaagtttcaactaagtcttcttcaccggcaaaatgttcaacttctggcatttcagctaattgaacgaattcttctggttcgtgtaagtagctccagatttcttcagctgtgtgtggcaagattggtgtcaataacttcgtcaaggctactgctactgcatagaaaacagtttgtatgttacgacgaggtgcatcattttgaccatcgatataaacaacgtctttggcgaagtctaagtagaaggctgataattcgttcgtcaagaacatgttaattgtcttataaactgtggcaaagtcgtaagcatcatacgccgctttacagctggcgatgattgcgtttaagcgcaccaacatgaacttatcaactgaacctaattctgcgtaatcaactgtatctttagcaggatcgaaatcagttgtgttcgcaatcatgaaccgcattgtgttccggatcttccggtaagcttcactgacttgttggaagttttccattgtgactttcacgtctgagctagcatcaactgaagcgacccagaggcgcacaatatccgcccccatttgtttgatgatcttttcaggcaagattgtgttcccaagtgatttactcatcttacgaccgttaccatctaagacaaagccttgtgaaataacagctttataagggctgacttcgccaactgcaacactggtaattaaacttgagttaaaccagccacgatattgatctgaaccttctaagattaagtccgctggataagttaagtcatcgcgagccgctaacacagcttgatgtgatgaacctgaatcaaaccagacatccatgatatctttttcttttgtaaattcaccatttggactcccaggatgtgtaaagcctgctggtaataaatctttagcatcccattcaaaccaaacgtttgaaccatgctctgcaaagagttgcgccacacgttcgattgtttctggcatgacgatttctgtgccgtcttcagcatagaagattggtaatggcacaccccatgcccgttgacgagagataacccaatcgccacgatcacgaatcatgttgtaaagacgggtctttccccattctggcatgaattcaactttttcgatttgtgctaagatttgatcgcggaacgcatcgattgaagcaaaccattgggctgttgcccggaagataacgggtttctttgtccgccagtcatgtgggtaactatgcgtgaagaagtcgagtttcaataatgaaccgttcttttcaagcgcttctgtcaccattgggttggctttatcgtaataaacgccttcaaaaccaggggcatcttcagtcataatccctttgctgtcaacgactgaaaggactggtaacttatatttagtgccagcgttataatcatcttcaccgtgacctggtgccgtatgcactaaaccagtcccagtttctaatgtcacgtggttgcctaagatcaccaatgattcacggtcatataatgggtggcgggctgtcattaattccatgtcagcacccttgaaagtcttcaagatttcaactgattcccaaccaagaagatcagtcatcttgttcaaacgttctgctgccacaacgtatttttggccgtcagctaacacttgaacgtaatcgaaagctgggttaaccgcaatccctaagttagcaggaattgtccatggggttgttgtccagatgatgaattttgtatccgcatctaataagtctttcccatccaccacgttaaacgccacgtacattgatggtgacttgatgtctttgtattcaatttcagcttccgctaaagttgattctgatgaaggtgaccagtaaacgggcttcttacctttatagatataaccttttttagccatttcaccgaagacccgaatttcttcagcttcaaaatcagctgttaaagtgatgtatgggttatcccaatcagcagaaatcccaagacgcttgaaatcttcgcgttgcttgttgacttgttccatggcatagtcgtaacaaagtttacgataatcaacgaggctcatttctttccgcttgataccctttttagccaaggcttgttcgattggcaaaccatgtgtatcccatccaggaacaaaaggtgcgcggaacccgttcattgatttgtaacgaacgataatatctttacttgttttatttaaggcgtgacccatgtggatgttgccgttcgcaaatggcgggccatcatgaagaacgaatgaaggtttaccttcatttaatttttgccgttgttgatagaggttgttatcggcccaacctttttgccaatcgatttcacgattcggtaaacctgctcgcattgggaaagctgtcttgcccaggtttaatgtttctttgatacgcatcaaatcactcctttatttttaaaaacaaaaaaagatcccgccctgaataggacgaaatcttcgtggtaccacctaaatttgaaggtcaatgaccttcctcaacatgcaataacgcgcattaagcgtcccaaattactcaattcatctggaatgaaataaggtgatacaccgctaaacagagcattaccaaccttccaccgtcgttggctcgcttaaatgatgttttgcttgctagtccttatttaaatctgttgcttggttttcaattgggttgtaagaatccgtaacagcttcaaccacttcatctgaatcggtgtcttcgactacatcggagagcacttcatcattgtcatcttcttcgactggtgtttcttcaccagggaaaataatggtttgcgttgttgtcacatcatcttcagcaatttgaccccaaggtttaacttctgcatccgagtttacttgatttgacccatggttgtcaaggtctgtcatatcaatttcagctgaaagagcttgatggtccgctaaatcatctttagctaataaatctgtccattcaggactcttaaccacttctaattgtgattcaagcataacttgtaatctttgacggaaaatccgtgtttgtttcttcaagtcatcggtttcgattgcaatttgttttgcacgttcagttgcatcgtcaatgatgtggtttgatttttcagttgcatcatccaacattgattttgcattcttttctgattcagtttgaatcatttcagcttcttttttagcgttatctttaacacggtcagccgcttcttgtgcaacaatgattgattggttcaacgcatctttcaattcattaaaatacgttactttttcatcgcttgattttaattccgcttttaaactttcattttctgttaaaactgattcgtagtctttaatcacttgatctaagaaatcattgacttgatccggattgtaaccccgcatttttgtgttaaattctttgttatgaatatctaaaggtgttaaaaccattttgaaattcctccatctttttcagcaattattttcttaaaatccccagtgtcactcgatatttttctttacgagtctgaccatcaatcgattggagttgaatccggccaaaaccacgaacagagacgatatctaatagtgctaattcaaaatctggtttatcaaatgcttgccaattcagtttaactttgttggcttgaattaattctttagcgcgttgtcgcgacagattgtaaacagttgaaatgatcgtatccaagcgaaacgagctgacagtcgtttgttcgaattgccaagcgtccttaggcgtcaacaactgtgtatagtcttgttcttgcaaatgaactgatacgcgaccaatcttagtgatttgctcttcgacatagcctgccatcttcttcgtcacaaagaattgccagcgttcttcatcggtcataatatccccaaaaacatcacggtcaatgccagcattcacaagcgtgccaagcaccttcccatgtgataggtttgcaaatttaatcgggtaccgaatctcaaataattgaatctcaaaatccgcatccgttggttcaaagtaatctggagcaatcattgcccgtttccgttcagcagcgttatatccgccattaaagtgataacggacgtcccctttttcaccgaccaaggtttgtaaaataaacgcttgacgcggatctaaaaacgccgttaagattggtcgatattcaacttgtgcttgctcaatccaatccaaaacctgcgcaacaaatggcgcctcgctttttctaaaatgttgatagacatctgcttgattgaccattgattacatccccactaataattgtgcgagtaagccgatcccacgttctactaaatataaaacgaaaaacgcagcaatggctgaaatcccaataccaccgattgcaggaatgaagcggtcaaagatttctaagaaaggttcaactaacttagcaacaaagcgccctaatttactgcccatcgcctctggaatccacgttaataaacaatagattacgacgatgccactataaatccgtaccacatacatgagcatcaagagcacataaaataaaaatagttgcacctagttcacctcaatatcaaaatcattttgatcgacaatatctgaaagattaccatcgatttcatagttcggtggcgtacataagaaaatctgatcaccaacccgttgaatttcaccgttgatggcaaaaactgcccctgttaggaaatcaacaattcgagtggcttgtgtcgcttcaattcgtgtgaagttaacaatcactgctttattttcaagtaaacttttgccgactttttttgcgtcggaataaatccgtggttcacataagacaattttattcattttagtagctcccgcagcttgcatcgagacgacgttattcgggcgaacacttggttcaccttcattagtgacagccgcagtttcttgcgtattagcatattcatcttcatctgacatgccgaaaaaattgctaagactaaacttaccagccatgagtcatcctccttagttattgcgacggcgcttgaaaaatggcggcacatcgtccccattttggttatcttgcttattatcatccgcttgggctgtccgtttgaagatatcgaaatctttcttttcaatttcatcaaatttttcagttgcttgcgcttgctcgcgggcacttggttcgcgacgcatatcccaatctacaaatggatcattattttgttctgatggtgttgaaggcgctgttgtctttggtgctgaattgtttgttgctggacgacgtttgttgttatcttcatcaatcccagttgcaataaccgttacaacaacttcatcaccaagattttcgttgattgaagtcccgaaaatcaagttaacatcgttagttgcagcttgttgcacgataccagcagcatcttgcgcttcaaacaatgacaagtctggtccacccgtgatgtttaagaggacttgttctgcaccatcgattgaaacttccaataatggtgatgaaatagccttcttcgttgcttcagctgtccggttttcacccgttgctgaaccaatccccatcaaggcagagccttggttagccataactgttttaacatcagcaaaatccaagttgacaaaccctggtgatgtaattaagtcagaaatcccttgaaccccttgacgtaaaacattatcggcttctttgaaggcttccatcattggtgtcttcttgtcaacaatttcgagtaaccggttattagcaatgatgaccattgtatcaacatgttgctttaattcagcaatccctgaagcggcgtttttaccacgtttagggccttcaaatgtaaatggacgagtaacaacccccaccgttagtgcgccaagatctttagcaattttggcaacaacaggggcagcgccagttccggtaccgccacccatgccggctgtgacaaagatcatgtcagcgccttttaaggcttcgttgaggacttcttcactctcttcagcagctttttggccgatttcagcagttgcgccggcaccgaggccgcgagtcaacttaggtcctaattggatctttgtttcagcttttgaatcttcaagtgcttgaacgtcagtgttagccgcaataaaatgaacgcctttaacgccttcgttgatcattctgttgacagcgttaccaccagcaccaccgacgccgattactttgatgattgcgccgctattttcttgtgctgcatctaatgaatattccatctgtttttcctcctgttacgactagcccttattcaaaaaagttactaaagaaatttttcaggccttcgaatgcattttttgattgatttttaggtttggttttcttacttggtacttctttggttgttgcttgagatttcattgttgatttcgtcactgtttggtctaattcagtctgtgctacattcccaagtgcgccttggaccaaccaatcaacttccgacaagttagctatgtagttaattaaactcaacccttgggcaaatgatggatgccgcaagcccatttgatctggaatgtataacttcactgggcaattaaagatttccttagccaagtcgacaatcccaggtaaagctgtcacgccaccggtcataatcaccccaccaggcatatcaaaagcgtgtactttatccaattcagctttcaaacgatcaaaaatctgcatcgtccgtgcttcaataatctcagctaattttttctctgtcacttgcactggtaaggcttgaccaacaacttcaattggaatttgttcttcttctgaagcagccaatgaatcagcattaccataatctcgtttagctttttcagcattttcaattgacgtgttcaagaccacggaaatatccttggtcatatggtcgccaccttcttgatcaatcgccgtaaattttaattgatgatcatgaatcacagcagctgtactttgaccaccgccaaggtcgacaacgattgccccaaaatcttgttccccgtctgataaggctagcttgccaagtgctaatgggttcactacgagttgtgatagtgttaaacccgctttttcaatacatttctttaaattatgaatcattgtcttgggtgcggtgaacaaaattccgttcatctcaagccgaacccccatcattccgcgtggatctttaatcccatcaaacccatcaaccgtaaacgattgcggtaagatattgaggatttcacgttcaggtggtaaattccgaaccaatgcggcactggcaacgtcttgcacatcttgaccagtaatttccttagattgatcagagaccgcaatcatcccttggcattcttcgatttgtagttggttggctggaattccagcaacaacccgattaatttcaatatttgctttttgttctgcttgttgtacggcttgttggatagcggtaaccgcttgatcaatgtccacaattgtcccgcgacttaatccgtttgatctagctgatccgacgccaatcacattaagttgtttattaattgattctgcaacaattaccttaattgaagtagttccgacatcaagactgacatatatttttgaattctccattaagtgtgtggaacctccttgcattcaattagaataaaatgattcctatgctaaatagtaccacatttcgactagatttagaaagccaatccaatctttttaaacagtgttaactaattttttgttgaatcagcctcagaattatcaaataatttggcgtaagcgccaacttctaagtcaattcgtcccttaccgtccatttgtttcgccagtgtgggataatatttaattttcttggcaagtgtccgcaaatccccaacaacctcattaccatcattcatatataagtgaacttgataaggattattgttcttaactgttaaacgaatttccgacacagcactttgaatgctgtttggaaaagcttgatatagttttaacccttgctttaagaaggcgtcatttttaaattgactatagacagggctattgccgagagactgcgtcattttcgtctttaaaatcgtgccattttctaagattggataatattgtttatgccgcactagatagcccaccgtaggatattccttaatcgccaatgtcagttgattaaactgatcaactttgacatttacgcttttcaccttaggtagtttctggtgaatccgcttctcaatcgctttttcctgccagatttgtgtcaggacgttattgccaatccgtacgccactcgcattaatcacctgttgatcaggcactgatttagtcccgttgaccgtcatttgttgaacgtcgctaatcggcaacataaaatagattgccacacaagcgcccaatgtgaaagtgctcaataacgctgtcaaccgccactttgtctttgccgttcgttgcgcttttagatgtggtagttgaccactaattgttggtcgcccaggcgttaaccgttgccgacgttgtttcttccaacgctttagttgataagcacgccaaacgtttagtaattggagcggatcgagcgacccatttttagttgtttttttcttcaagtcatccgcccccttcttaacttagatgatagtattaatcacttcaataatgcgatctgaagcgtctggaatccccattttcttagctgctttagccatggcttgttgactatcaggggttgccaaaagcgtatctaatgactgaactaatttgtcacccgttaattgtgcttctggaattaaaatcgctgcgtcttctttaaccaaactctcggcattttttgtttgatgatcatttgttacataggggcttggaatcaaaattgacggaatcccaagtgctgtgatttccgccaaactcgtcgcaccagcacgaccaacaatggcctttaaatctggtaaaatttcaggcatgtcgttgatatatggtacaacagccaaattatcgttgagcgtcatcgtctttaattgtgcttgaacatcatcaaaatgaacccgtccagaaacgaatagcacctgatactctcttgtattaagtgctggtactgcatcgataaaagcttggttaatacttggtgcaccacggctcccaccaaacacaagcactgtcggactgtcagtcttaagcccgaattcacttaaacgttcgtttggtaacattccagcaacttgttgggcccgcggattacctgttaatacaattttgtgcattgggaattggtcgctgactgattcaaaggaaatggcaactttatcgacaaagcgcgccaaaaagcggttggtaaccccggctgctgagttttgttcatgaatcaacgttggcacttttaagcgacttgctgcatatagcaatgccccagaaacatagccacccgttccaatcacaatatcaggtttgaatgttttaatcatttcttttgcctctttaacactgcgcaagaaaagttgaattgttttaatattcgttttaatgcccttcatattcatcgaacgtttaaatccttggatttctaacgtcttaaaatcgatgtcttgatctggcacaattttactttccaaaccgcgtttagtcccaacatataaaacggcatccaacaagtcgcgttgttgcattctttcaattagggctaacgctggatagatgtggccaccagttccgccaccagatatcattactctcattttagaatctccaatttaatctgtaatttgttcgactgccttaataaagacgtctccacgttcttcaaacgtcttgaactgatcccagctcgcacatgcaggcgacaataaaaccacgtcgccggcttcactagcagcataagcttcaggcactgcttttgttaaattatcaactattttgatgacgggaatacctgcttcacgtgctgtctgtgccaacaattgtttggtttcaccatataagatggttgcttttacgtgttcttttagtagtggtaataatggttcgaaagtaaagccccggtcaagaccacccgctaataaaacaattggttgtttaaaactcttcaacgcgacttcggtagcttccatattggttgctttagagtcgttatagaagcggcgaccttcatagctcgtcacaaactgcatccggtgtttaacaccggtaaaggtcgttaaaacatcaatgatcgcatcgtttgattggtccatcaacttagccgccgcaattgcggccaaagcattttcaatattatggtcaccagggacgttaatatcagtcactggcattatcacttcacccttaaaacaaagttggccatctttgacataggcgccagcttcagagttgcctagccgtgaaaatggcacaacttgcgccttagtttggcgactcaattcacgtagttcaggtaagtcccagttgacaacaaaaaagtcgtcagccgtttggttttgaataagtcgcattttcgcagccacgtaattcgcacgcgagccatgatagtccaaatgtgcttcataaatattcgttaaaactgcaatcttaggtttaacggttgttgtaccgagtagttggaaacttgataattctgtgaccatcacatcggcagccgtcactttttgggcgaccgcacttagtggaatgccgatattgcccgcagcgtatgcgtgcccctgggtgcgattttcatctaacatcaacgtaattaacgttgtggtagtcgtcttcccgtttgaaccagtcacactgacccattgggcttcagacacttcgtacgcaagttctggttccgttaaaactggaatcttacgcgcaatcgcttctgccaccattgggttatcgtaacgaatgcccggatttttgaagaggtatgcaaagttgcgctcaaataacgccaatggatgcgatccagtaatgacggttgcccctaattcacgcaattgtgcaacttgaggattgtcttcttgttcctttccgtcattgacggtcacaatcgcccctaattttaataacaatttagcagcattaaagccgctcttccctaatcccaaaactaaaactgcctgatcttgatacgtcgtgctggccttcattaaattcgccctcttctaaaaaattaacagataaattgctgaacagatgatactaaataaccaaaagctgatatcaatccgccattcactccaccctgacatttcgaagtgatgatgaatgggactcattttaaaaatccgcttatggaataacttaaatgaaccgacttgtaacatcacacttgctgtttcaatgacgtatactaacccgaccaatagcagtgagaactctcgatgtaataaaattgacatggctgctagtgcgccaccaagtgctagtgaaccaacatcacccatgaaaatttgcgctggttttttattgtagattaaaaagccaagcaatccgccaataatgctgaggccgaaaatggcgacatcaatttggttttgacgaaaggcgataattgtataagttgcaaatgagatggttgccaagccagcaactaacccatcaatgccatccgttaagttcaccgcgtttgagaaaccgactaaccacactaagacgaatacacaaaagaaccagttacttgaaatagtgccaattactgggatttcaagtgcagtactgaagccttcatggaaataaacagcgatgaagacaatcccaccaataatttgccctaacaatttttgccaagcgcgtaagcctaagttctgtttacggaaaactttaataaaatcatctgaaaaaccgagaataccgtataacaccagaataaacatggcaattaatagactattcgttaactgttttaagaataatcctacccaaatacttgaaacaacagcggcaataatgaataagagcccgcccattgttggtgtcccatttttcttagcgtgccatttggggccttcttcacggattgtctgcccctcttttttaaagcgtaaatacccgataaaaagcggcataaaaatcaccgtaattacaaacccactcattaagggcactaaaaattgtcctgctgccatttcataaactcctttaatccaactatcttattttaattgtacttttatttttttaaccccatctagcaacccattgaccgctaggctttgatgataagcatatccgctacctttgatgtcaatctcaacacctgttaattgcgcgagctttaagaggtcatttttcgaccaacccgtgacatctggcatcgtcattgccccattggtcattaaaatgactcgctgtttaggtaaaatcacactattggcctttggtaattgctggacgactaagttcccactaccaacagaagcggtttgtaggcctaaatccgttaatttcttttgtgcttcatccgttgattgaccaatcacagacggaactgttacttgttgttgtgtgtctttttcagcctttttggtatactccagtgcccgtttcatcattggattgaagacctgtgccaaaatactttcagcactatctgtcatattctgtggctgtttcattgtgacatataaaatatacttaggatcatcagctggtgcaatccctgatacagagaagatataattgcttgcgccggttaaatagccaccgtctagaccagtaatttgtgcggtcccggttttaacggctactttataatctggaatttggtaaacctgacccgtcccataatcttgataaacaacatcttccatattttgtaagacagatttggccgtgctagccttaattggtttaccagctttgattggttttacttgatgatcctgattaatcccagataaaatctgcggtctaatcattgtgccatcgttcgcaatcgcacttgtcatctgaagcatctgcattacattaacgttaatcccttgaccaaatgaagttgtggcctgatctagtggccgaacatattgcaatgtcccctctgtttcgccgggtaattgaataccagttggttttaagaaaccaaacttctgaatgtagtctttccaaaccttaggacccatggcttgttcaagcttgaccatcccaacgttacttgatcgtgcaaaggcttgactcagcggaatcatcccccagccactcgtttgccaatcgctaattttcttatcgccaactccaatcgaaccggattgataatactgattaggattgtaattaccagagtcgatggcagctgccaaggttgcaattttcaaaacagagcctggttcatagccatcttcaactaatgtatctcgccaaatcttgccaattccctttttagtgctggcattaaaggttggtcgttgtgaagccgccaaaatttcacccgttttagcattcatcaagacggcattcatactcttaggcttatattttttattgacgctcgttaataaagtttccatgtatgattgtaaccgagaatctaaggtcaagtaaatatcttggccgtttttagcggcttttactttgtttttcttttgattgatcgtgtatccataggaatcacgggcaaaattcttgtaaccatcttggcctgctaattgtttgttgaagtatttttcaatccccattacaccaacgaggctttgatcagcgccgtcttcgtcctttggtgattgagcgataccaatgacgtgagatgcgaatgttccattagggtacagccgcgtaggggactcattgaagtaaataccggttaaatgttctttttcaatcttccgtttgatgctcagtgaaaggttttggccggcacttccgaattcaacttgataaactgaacggttagctggcgttaattgtttatagattttttcttcactcaatggtagatagcgactcaaaactttcgctgtttttttcttatcagttacatataacggcttcttattaggaccaacgtaatcgtgacttaataccgcatacactgaataggcgttaatatcttgtgccaaaacgttccctaaagaatcataaattgtaccgcgttgtgcgcgaatcacggaatcagctttgtattttttctgtgatcgtttcgttaaatccacccctgcaatatgcccagtagcagcaatgtaagcaaaacgaccggcgaaaactagaaaaatcgccgcgataattagcaataaaagcctgccaaaaacgcgtcgattccgccgtggactcttacgtgtcttaactgatttcatttagacacgttccgaatattattttcatttagtttaagatcatgtttctgggcaaaagcattcagacggtcagagcttgttaattcaccgatctcctgttttaaatcattattgttagcgctgacttgggccatcttttgagtcgtactttctaatcctcgttgtgcattaacaactgcaattttggtggttaacaaactaaccaacatcgcgaaaaagataattccaataactgacgtcgctaatttttcaacagctgaaaaagccacttttttagactggcttgcaactgcttgtttatgtgcagtaggctgcgtttttagcggtgctactggcgtttctaattggcgtgccgtgttagttgccatcatcatcaatccttctagtcaatttctttttgtttttctgcgacacgtagcttagcgctatgtgcacgatggttttcttctaattcatcatctgttggtagaatcggcttgcggttcactaattttagaaccgttttttgttcttctggtaaaattggtaaccctttcggtaaatctgggagcgttgcttgttccttaaacatcgtcttcaccaaacgatcttctaatgattggaacgtaatgacactgatccgcccgccgacattgaccaatggaatagcttgttcgagtgaatcttcaattgcccctaattcatcattgaccgcaatccgaatcgcttgaaaaatccgcttcgctggatgtccaccctttcgtcttgctggtgcaggaattgcttctttaatcaaatcagctaattcgattgtcgtttcaatcggcgcaactgctctttgttgttcaatcttccgcgcaacttgttttgagaacttttcttcgccgtagcggaaaaagatcttaattagttgttgataggtccactcattaacgacattgtaggcactgagttccgccccttggtccattcgcatatcaagtggggcttctttcttataactaaacccgcgttgggcatcatcaaattgtggtgatgatacgcctaaatcgtataaaataccatcaatcttagtcacaccgtgttctgctaacgctgcttttaaatagcggaagttactcttaataaaagtcacttggcccgcttcagcatatttggctaatcgttgtttactacttgctaaggcatgatcgtcttggtcaaacgaataaagatgaccggtcgtcagctgagataacaaatattcactatggccgccgccccctaatgttgcgtctacatacacgccatcgggttgcacattcaaggcatcaaccgtttctttcaataaaacactttgatgtttaaatgtttctgtcatctatttaccatccttctaaaaatcaaaatctaacatattttctgcaatatcatcaaaattctcttcagcttcttcgctaaagctcgcccatttttcctggctccaaatttcaatgcggtttgagaccccgattaatacacattctttttcaagaccagcatgtttagcaagtgtgtctgggatattcacccgaccttgcttatcaggggaacattcgaccgccgctgagtagaaaaagcggacgaacgcgcgggtatcttttttagcgaggggcagtttttttaacttctcttccaactgttcccattcactaagggggtaaccaaaaatacaattgtccatgccacgggtgagtacaaattccgcacctaatgattcacgaaatttagccggcatgattaaccgacctttcgtatcaatcgtgtgatgaaattcgcccatgaacataaccattcacccctttgcccaccttaactgattttagtctaccacaatcccccactttctaccacattttgccaaaaaaaaccaaaatcttatcattttggaaccaattgtacacgatatttatattactagcctttttgaccaaaaaaaacagccatttcgttaaccgaaatggccgtttcacttgttaattaagtaagcttattttgggctgtcgcaccacttctaagcaacgccgcaaaaaattgctcactttaatctaatttttagaagtttaaaatgccagttgcagcgagtgaaccaaaaatgactgagcccactgtggcgattaacattacccaaacgaaaattttagtaatgcgactaaacgtgcttgtttgtttcttcaattattccaccacctagacttttttcttatcagcagtttacaccgaatcacttgaaagtgcaactcagtcctttttatcttttccaaaagacggtacaatgagactattaactttcgaggtgatttaaatgccatttagcacgacacttttctttgcaggcttaccgcccgtctgtgtcgcactcggctactgtatcgaccggttgactcagcgtctatttaaacatcgttttcattatattaattggctaccaattccattgctagtaagtgctatctttctgagtatgccaattttcagtaaagctggctggttcttttgcttagctatctgtctgtggggaatcatctggagcttaacgcgcttttactacgaccgtgcgctgtacctacgtaagtttctacggagttggtggcgctttgtcctcgtgatggccacagcatggtacctatcctttctaatcatcacactcctttaaaccaaaaaaaacggtgtcgactctttcaatttgtcgacaccgctttttttagtttaaaaaatatttccctaacgcgcttaattgcgtaattgtgattgtcggttgcaccgtgattggtaatcgatcaacatcgaaataggccgtcgccacatgggcgttaatccctgcttcaatatctaatgcacgatcaccaatcatcacggttttagttttatccagctgataacgatcacataaatcgttcaaactatctggcgccggtttcctggcaaatccgctctgactcgtaacaatttcagtaaaataatccgctagtccatgcgctgccaaaaatttttctgcagcatcatcacgatgggtcaataagaaattctgaccatgtgcactaatctgtttcaaaatcgccgctgcccccggataaggttgtggcgtctgttgtaattggtgttctaattcatgatattctcgatccaattgttcaaatgaaacattagtttgctgagcaagcatctgcagttcccgtttaattgaagtctgcttaatcgcttggtataagtgcgattgatcgactgcgacttgatgatcacggtaaacctgactgagcgccgtcatcataacaggataagtatcatacaatgtaccatcgaaatcccaaatcgcattttgataactcattaattatccattctcctttgtatcaaataggatagtgactggaccgtcattgaccaaagccacctgcatatcggctccaaattctccagttgcgacgcgaatcccagtcgctgctaatttttgattaaactgttcgtataagcgtttagcatagtccggtttcccagccgcagtaaagcttgggcgattgcccttcttagtgctagcaaaaagggtgaattgtgacaccgataaaatggcaccgtcaacctgggccaacgccaaattcatcttgccatctgggtcttcaaaaacgcgcaattgactaattttcttaaccaagtaatctaaatcagcttcagtatcatcatcacaaataccgaccaataacaaaaagccttggttaatcttaccaacaatcgtctgatcaatcgtgacacttgcttggctcactcgctgtaatactactcgcatattaagtcgctcctatccttgaacccgtttgacttcgtaaacatctgggatgttcttcacggcttccataatcgtttctaaatgatctgtattgcgaatgccgactgtcacatgaatatccgccatcttatcgtgatcaatccgccccatcacgttatttagctgtttcgtatgtgcatttaaggactgtaagacatcgttcaatagtccaccacggttatagccgtagatttccaaattcgcatcatagagttgatcattcttagcgttggtattttcccaactgacttcagtcaatcgactgttcatatctgcccgatcaacgatattcggacaatcgcgccgatgaacagaaaccccacgtccctttgttacatagccaacgatatcatcaccagggactggattacagcatttactcaagtgcactaagacattgtcgacaccttcaataacaacaccgtcttcatgtttgattgtgatatggctaccatttgctttaggccctggttgttgtgaatccttcgctgatagaatctcagcttctaatgctttttgttcactttcttcttttgcccgtcgttctttaatcgttaagcgattgacgactgactgtggtgagatttcaccgaacccaattgctgcaaacagttcttcttcggcattaaaattaaaatgcggtaggatgacagctatctcggctttagtgaggtgttcttttggtgtataaccatcttctaccaacagatgttcaacagccgtccgtcctttttcgacgttttcatcccgatcttcttttttaaagtagcgcttaaccttattccgagcacgcgcagtgaaggcgagcttaatccaatcacgacttggtgtcgcacttgttgacgtcaacatctcgacaatatcaccattacgtaattgatagttcaacggtacaattttgccgttaatcttagccccaacagcgtggttcccgacctcagtatgcactaaataagcaaaatccagtggcactgaaccctttggtagttcataaacatcgcctttgggtgtgaaaacataaacgcgatcgctaaagatatcgcctttgacactttccataaattctgcagcatcatcggaagcatcttgaatttcaagaatttcacggaataaatcgagtttacgccctgattcatccaccttaatctgttccttaacgccttctttatacgcccaatgtgcagcgaccccatattcagcaacatcgtgcatttcttgcgtccgaatttgcacttcaagcggtttgcctttgggaccaatcacagttgtatggatcgattgatacatgttggcctttggcattgcaatgtagtctttaaaccgaccgggcatcggtttccacttagtatggattgctcctaaaacagcatagcagtccttgattgagtcaacaacaacccgaattgcgagtaaatcatacaattcttcaaattgtttatgctggtcgcgcatcttacgataaatcgagtaaagatgctttggtcgtccataaatgtcgtaattcatatctaaatcagcaattgagtctttaatgtcttcaattgcttcttgaatataagattcgcgttgtgtccgcttagaattcatcaggtgcacaatccgatagtactgttgtgggttcaaataacggagcgagatatcttccaattcccacttaatcttactaatccctaaccggtcagccaatggtgcatagatttctaatgtttcgttagcaattcggcgttgtttttcgggtttcaaatgtttcaacgtccgcatattatgcaagcgatcggcgagtttgaccataatcacccgcaagtctttagccattgctaataacatcttccggtgattttcagccagttgttcttggtgtgatttatatttaatttttcctaatttcgtgacaccatcaacgattaccgcaacatctttgccaaacatctcttcaacatcacctaacgtgatattcgtatcttcgacaacatcgtgtaagtaaccagaagcaaccgttgcgggatccatcttcaattcagcaagaatccctgcaacttgaattggatgaataatatacggttcacctgattggcgaacttgttctttatgcacataagctgcaaaatcatacgctttttggacaaaagcaagatgctcagtattcatgtatttctgacataactgtagcacttcctgctgtgaaattactttttcttccggcatcctgcctcactccaattcctcttactcgattaaaaatgtactgaatacaacaaaactgactcaactaattaactgtcgagtcagtttgcttaacggcgttcatacgcagtactaattcctaagtaacttaataaacaataaataggaacgaaccaatagttataatctgcgtagcgcacaaccaccatcaatccaaataaaatcggcaggtacaaaatgtgataccaagctgcatgggtcttttgaacacgatacccaatcataaaggctgcgcaaccattgacagccatgaatagcagtccaatccgccacgttttatcgatgtgcaagacaccaaacactagcggtaaaacgaccgccaagagaatggccactaataaatagcgtacccaatccatttttaaataacgattattcataaatttagtcatgttgtgcccctctgtaaaaagattatatctatcatactataaagtagccaattctgtcacatacgaaatcgcacttaacagatataacggcgcggtctcggcccgtaaaatccgtggtcctaaaccagccatcttaaagccagccgccgcaagcatctcaatttccttgggcgcaacgccgccttctggaccaaaaacacaaagtaatcgatccccagattgggctgtttgtaagctctgaactaattgggaatgctcaccgtctttagctgactcttcgtaagccactaatttaatcgtcgctgattcttgtgcgaccgccgttaaactgttgcgccattcaatagttggtacatgcgtccggtgagcttgttcggctgcttcttgcgcaattttttgaagccgcgcaactttcttagcttgttttttatcatcccagcgtgcgactgagaattggctattacagaaaataaaccggtgtgcacccaactgcgtgcctttttgaacaatccagtctgttttgtcaccctttgacaagccgcatacaatcgtcgtctcaatcggtaattcaactgattttgtaattggcgattgcaccgtaacggtgactgttttgtcagttgcatccagttcagttaattcaccgatgaatgcttgttcatccggcgttaccaattcaacacgatgaccaggctgcatccgcatcacttttagcatatgatgtgcagtttcacccgttaaggtcacttgttgttctacttgaattgcttcatcaataaaataacgttgcatgccatactcctcttaatcgtcgtccgtcttttggcgtgtaatcaatgccacccagtcacccatatgaagggcttcttgaacaacaaaatcattcgccgataacgtttcacggacaagtgcttctttatctgcaataatgccggccagtaataggtgtccattgtcattcaataaagccttggcttggggaatcaagggcacgataatctctgctaaaatattggccacaatcacatccgctttcgttgtaatcccgttcaacaaatcgttgggatgggcatcaatgccagcggtcactgggttgagggcaaaattttccttagcggcatcaaccgcaacttgatccacatcataggcgcgaatatcattgactcctaaatgcgcagccgcaatactcaaaaccccagaaccagtcccgacgtcaattaaagattcaccgccgcgtaaaaccatttctaacatttgtacggatagatgggttgttggatgcgttcctgttccaaaagccatccccggatccatccgaatcagtgcttcgcgttcatcagtcggttgatagtcggtccaacttggcacaaccgttaaaaagcgagttagccgcgttggttgataatatttcttccaagctgtcgcccaatcatcatcggcgacttgtgccaatgtcactttaccagaaccaatcgctaacccaaagtcagtcaattgggcaacgcgttgttcaatcaacggtaatttttccggcacaaaaactgtttctgggaaaaaggcactcactgcagcacccgtttcaaggtggggaatactgtctagatcaataatttgatctggctttgcctttaaatgttcataatcggctgcgtcttcgatttggattccttccgcaccattttccgttaaaatattggcgattgcttccactgcttcattaacagtagcgaccgttacttttgtccattccatgtagcatgtctccttcttaatgcgggttgcttagtatttagggtaagcgtagtattttttcgctaattgatcatctgcttgagcgacagttgcttggaaaacagtgtcatcccagtttaagataaaggtttcttcgtctgattcatcattcacaaaagcggctaattgatcttcgccttcatctaataagtcttgtaaatagttgaaaaagccccgaccgacttgtgcgtttaaccccttgcgaccagcaaatggaatcactgctaaataattgtctgcatattcaaagccgtccatcttactttcatcgaagaataaaatcgcatcttcataactgatttcatccgattcgttcaattcaccattttgatcttcaacggcaattgcttgttccttagtcacgtttaatgtgaattccaattcaatcgcccgagcttgtttgtcccagttgatattcatatccccactaaattgtaaatcatctaattctgcatcgaaaaatactaacatatccatttcagccattatattcaccatatccttttaattagtcgttatttaagtcaattttaaagttgaacgtattaacatcatacctgattatgacttgaatctaaagcaatcattcaaaaaagcccagaacaaaatgtcccagactttcaatcgtaattctacttaatgtgctgcttggttctgaccccaataaataacgtccatactctgatcgtcataacgttggaactcaattccgagtgctgcatcagattctgccatcacacgaccatatagccgcatatcagcttctggcgtgttgccatctgggcgaatggcatgcatcaacataaacttagccatttctgattgtagatgggcttcaatcggggccaacggatcaaaaaccatcgtgacaaaccgaatatcactactatcgccatcaccaattaattcaacaatcggaaacccaccaaaattttgttgttgttttaaataagccaataactggtcaatctgttcttttgtgaaggctgatttataaaagaggaaatgccaagtttgtcgtttcatcgtgtcacccacccgttatttattacatatagtatgccatactgtcaccaacaacgcgaacttagtctttttttggtaattgattcgattttggttggtgatatgcctttttcaagccagcaaatgtcgcttgaatcttttggtaatgcatttcatcgttacgcgcatgcttcactaactgggtaaaatcgtgggactgtaagtccttttctgtttgttttttaaaccacaacatatcatcactccttatgtaattttattatacaacgaaacgttatcattgcagtcttaaatttacttttaaaccaaattgccgtaaactaacactattcattaaaggagtctattatgggaaagaagaaaaagcaaaacgcattatccaaaacattagttgaaaaaattctagataaacaaaaagtggcctacacccaacttgaattcccaacagaggaagtccacaacattgcccaaatgaaggccgatcatctcgatatcgatgaacatcttatttataaaacattggtgctctctggtaagagtaccggcccaatcgtcggtgtcgtcccgattgattgtcatttagacgaaaaaaaattaagccaaatttctgacaacaaaaaaattgcgatggtcccattaagggagctcatggccactactggctacgaacatggcgctaacacgcccgttggaatctgggaacaatcccactatccgatttacattgaccaacaggctgaaaaggaaccattcatctatgtctcatccggtaaaattggccgctcaattcagattaatccgcaagacttacagcgggtcactgaagccacctttgctgacatcagtgaagcctaaaaatatgataagaggggctagaacaattcacttgttctagcccctcttatttttgagtttaatctaagtattgggccaaattagcaccagaaatgatgacttgttccttcagcaaatttggttctttaataatattatgaaccaccgtttcgggtaaaacatcattttgtgcgagcatttgcagagcatcatcttgcatcacgacttttttaaccatattatgtattttaatcgttgcaacatatttttgcgattcccgttcttcaaccacttcgtagttgccgtaataatgtttatctgtcattaactcatccccttaaggttaataatatcatatttcaacaaataaaactaagtaacttatcctataataaggggaaactgttaaaaaataccaaaaaaaagcaaaacaataactgttttgctttttccattatagtaaggagagtacaggattatattaggactatattttaccgtagtaccagtatttctgtactcttctgggacaatattgggacaatagaatttaaaaatttaaatataatgtatttgctttaccagtctttttatcatgaataaaggccgtgtgtttaacagaaccgtctggattatagacatctgatttttttaaggtcatgacatcactcacccgcagtagggtggctttaccaacttgaaagatggtgtagttacgccgacccgcccgaaaactatctagtagagaaaaaactcccccttaagtttgaactaattaatttagaaatattatgtccatttacttcttaacagattttaaaattctatatattaaatacattagataattaaattcttcatttctccaaaacaaacctgtaaacagaatacataatattaaaatcgcaattatggagcgtacaattattcctgttagctcaccaatcagtacaaatgaagtgattgtgtaaaccatccctataattaaaactcctaaaattataaataaatattgcttgattaaaaatgattttacactctttttaaatccgtaatggaatatttgcctattttcccaccaactacttattaaaatagtcgttaatagagtacctgttaggacaccatttattccccaacctggatgctcctatcctagtatttggtacataaatttctgaacagttgtgccataattaataaaacaagataggagcattccaatgaaacgatatcaagatgattttaaagccagcattgtgaagatgcatcgtgaagagaaaagatctattcgctcgctttccgaggaatacggtgtttctccagccgcaattcataactgggttaaaggcgctaaatcagttgagctagaagacggtactgaagtaacgtccaaagaattaaaacaacttcaaaaggaaaatcagcgattaaaggaggaacttgaaattttaaaagctgcggcggtgttactgggaaagcattaggacgaattaattgccttgtcttcatagaagatcagttattgcgacaccgcttatcaattattctttcggcactgaaattaccgcgcagcacctattaccattggaaaagatatcaacctagtcaacacgaacgtgttgataatcagctcaaagaaaaaattaaattgatttgggaaaataattatcgtgcctatggttatccacgaataacgatggtgcttcgcaagtcaggcatctgtgttgggtcaaaacgaattttacgattaatgagggaaatggagattcactctttaatgaatcggcgatttaaaaaacctggcactcatgtggatcattcacaacgccccaatttaatcaagcaccagcccaatgcaaggatatggcgtgctgacattacttatttggaattacgtccaggaacctgggtttatctcagttctatttacgaaccaaaggttcatcaagttcttgctttcaagattggtcgtcagatggaggcgacgttagttgtagaaacgattaatcaggcgcttgaatgtcatcaaaagccacaatattttcactctgacatgggttcacagtacaccagcaacgaagttgaaactttacttgaacggcatcagatcagccactcatactcaaaacaaggttatccttatgataatgggccaattgaagcttttcactcattgttgaagagagagtttgcctttcaaacaactttttccaattttgaggacttggtaatccgaacctcaaattacatcagttggtttaattccgacagaattagaacgagtgtttagaaaaagatgtgccatttattgacataggagcagagtgtactacttcacaaataatttcaacgataaaattaattcagaaattcattttttgaatcatacatttagctaatgctcgtaataatttgattgatataagtttcatcatgcgaatcactaataacacgaccactgggaatctcatttacatattttcctttgataggtattcgtgtctgagcatgcattttaaaccattcgtattcaacatccgcatggccaatatctatcgcttgatagcccaaaatagataaatcaaatgctaataccgttgctgttggtcctaatgcaatcagaattaaatcatcaatatttgaatgttgtcgtgttacttttaatatttctgaataagaagcaaatgcgttgttatgcggacagataattcgctgtacacttttagtgttttcaagaagactattaccaacgccaaatctagtctggtctccttccaccaaaatcacatttttattattccataactcctttaactttttaaagtagcttaaactatcattcttgtttaccctatcaacataaggccttgttatatttgcatcataataaaccttatttttgtcagtaaactccagccacttaaatccatactcaccaattaaaaagcgccatgaatctgcactatagggcacatactgcttaaccgatttaaaaacatcaggaatacaaataatgatgtcctcactatctgatatcaaaattttgcgtagtcgctgtgccagctctggggaattatcttgaaacgaatttttattgttattcatcatccatttaaactcaccgtctccataacgagcaaccgagactttattttttataatatagtctaacgtttccgatatattcatcactttgggcttatcagaaaacaacataaacatcaagtatctgatcagaaatacaggatggcaaagtttcctaaatagctcatataaaaaagagtttgataatttatgtttaaaaaaatcctttattgtatgacgaagtcttttattattcaatctataaatatcctcctaaaacaaactatactcaattaaataaattattattatacaataaataactaattgatggccccacgtcaacaaactctatagtaatataaagtaataagttgactactaaaagtatgctcattattgacttactaatataaaatcctttttttaaattaaaatacataataaaacttacatagaccgcgaaagtagtattacgtgatattctcaaaaaattaccatcaatgaaactcaggggtatagttaacaacccaacacacgcaagcgccatcaatatagtaattttattttttgtattcttatttagctcattgttaagtattatcctacgatagcagaaataaactaaaatgaaactaaataatgcaattaaatcattaattatccaaccgttatgaatgctatcaaactgtaaataattactgacaccccgcattgaagataactgattccccaaaataatgataatattattggttactgttttattcatcatagcaataaacattagaaatattacaacaatatatatcttgagcatatttttcggagaaattcttagtataatatatattaacggatatattaagaatatataaccaagagactgaatagaagcagcaagtaatataaaaataatagaaataacaaatctttttttagtaaaatcaattaaaaaagttgttgaccagactagtaatgccatcattaatgaatttctaatttgaatagcatcataaacgaaaggagaaaataaatacaagatacaaaataaattagtattcttagaactaaatttcctcattgaacaaactaatagaagaaaaataatactatatgttagtatacgaaatcctgtatatgaaattcctgcatactgaaagggagtcatatagagtaagaaacccttatcatatgttgttgctttatacccaaattcatataaagcacgataagcattataatctggtacaaaactacttgtataaccaacaattatagtttgtacaagaaataaccagaataatgatatattactcaatgaccgcacattatttgttagtaagcagccaccgactgcaattatcaataatcctagtaacatttaatcacctaaattcacaaaataatattcatacttaaaactctatggttaattttaaaccactcagtataccattaaaaatacttattaatttatccttcttattgctttcatacaatattactaacgtaattatttttaatagacgtaatattgtcataaatgagataaaatttttatggtactttcgtgaaatataaattatattttgtgccatataaaacttgcggaacgctgaatgattctgtatttcgattttaaatcccaataatttagaatatgtaattttcccaatttcgtgtattaataccgcattattaactctgattatcttatagccgagcttcctaacacgtatgcaaaagtcaaaatcaacccaatctataaacatctgttcatcatattttccaaccttttcccacactgaaacatttgtaagcgctccagatgtaatacacttatctaataacaaagttgcttcacttgcaagagtttcaaaactagtatttctatctcttatggtgggacatataataccaacgctttctatttcaatgaaattaaaatatttttgtaacatatctttttcagctacagaatcttgatcaagagtaagtacccactctgtccgattattttgtaatgttgccattatctgatttaaagcagtagcaataccaagattttttatatttttaatcaaagttatgttgtaacctttaatcaactcagtaagctcattgatattatttgaattattatctacaatcacaagattcttacactgtttataaatagattcaatattcatacgtagtctctcaatatttggattataggttactattccaactccaattttaatcatgataactccttaatacttatcaaataatatttgcaatttacatataacaacaactggaaaaaaactatagttcagtttagaactaaataataattgaaacttttttctaatcgaatctctatacgttgctatgtttgttactaatacttcattatcctctctgaggtactttttaaattcccctgcaagaattctagaagtattatattttaaagattcttcgcggcttaaattaatctcttttaaaattctttttaaagtgatttttccggaagacgttgtattagtttcatatcgcctaaaataaatatatgagtgcgaatcatatatagtctttccgccaattgccaaatttagtctataaatccatgaatcatgtccagcaagttgatttatattatttgtgctaatactcaagttatttaaattgttattaaaaaccatcgtacagcccgctacactacttcttatcatagcatgaccaaaattaatatcttgtaaattatactgtttttcacctaacttttttagatccttatccactaaagtaagtcctgaaaaatataatttgtacttattgttacctttacctaactgtttaatcgcgctaattagtttgtcaggtaaccacacatcatcctgatcacaaaaagcataataatctgcagtatttttagctaatctacataaactaaaaaagctccttgtatatccaaggttatgttcaagaaaaacagttattcgaggatccttttctgcaaactttctaactatattcttagtagaatcacttgaaccatcatcccgtataaataaatgtactttaactcctacctgagaaagcacactttctatctgctcttctaaaaaacattctccattatatgttgataatagtaccgaaactgtctccatactaaattatattctccaagtcatttattatacaaatctactataaatatttaacataattttattgacacattttttatcaaacttttgagcaaccaatcgattattactgcccattttcttacgtaactcgtcattctctagcaagacttcaataccgtttgaaaatccaaaagtatccaacggatcataataatatcctgtaattccctgttttgtataatctctaataccatttatattagaagctaataacggtaaaccactagccattgcctcaattcccgcaagaccaaatccctcacgcaatgaaggcataatagcaaggtcagctattctatatatttcttccacatgaggttgatatcccaaaaaatgtacttgattatttagccctaatctacctaccaaatctctcaaatttttttcctcattaccaataccacataacaataaattaatatttttattctttagtaacgagattgccttaatagtcatttcttgattctttcgcttacttaactctcctacttgtattactgtaaatttattattaatttttaactttaattccttattaataggtgcgttcaaaaatttattagtatcaattccaacactaggaatataatcaacattctttgcatagaacttttgttttgccctgttaaaatcttctttattaatagttattaagtcatcagtaaaaccagataatattttttctattggataaaataacaaccagtctttttttcgcccacctgtgaagaattgaaaaccatgagctgtataaatcactggaatatgttttttctttccaactaatcttgccaaaacgctagctaacggggaatgagtgtgtatcaaagagaaacgagtctcacctgtaatatgaagtaattgtttataggccgtcaaattcgaattaatcgttccgattccacgagaaaaatcgacttgataatataaaacattatgctcttttagatattgtttaaaatccgtaacctgttgcttatccatagaatctccagattcgaaattggttgcaacacttatagtacatcccttatcctgtaacattctaatattgtcgagattgaactgttttatcatcgatgctaccgatgatatcattagaacattctttccctttatcattatctagctccatccccggtcactacaacacgaattgtctcaaagaaaatctcaatatcagtcaataccccaaaatgctttatgtagtacatatcattagcaagcttttgtgctggcgtatcatcgtaaccaccgtgaacttgagcataaccgcttagaccgggtttaaccaataaacgttgctcaaaaccttcaatgtcttcactgaattgttgcgtgaatattggccgttctggtcttggaccaatcaaactcatgtcccctttaattactgaccacaattgtggtaattcatccactcgagttttacgcataaaatgaccaacccgtgttacgcgtgggtcttctttctttgcccacattgcaccagatttcttctccgcatcactatacattgatcgtagcttagttactttaaacgattggcccattagcccaacacgctcttggctatagaagcacttgcccggtgtttctaacttaactaaaatcatagaaattagaataataattgaagctggaatcatcaatagcgttgcgaagattagatcgaataaacgcttaaatggtaaatagatgtgatgaaacggttgatccaatttagctacaaaatcatgttcatctactgtttgtgtatgactggtttggttttccatgataagattccccctaatccgttaacgattcccaatataactttaacccagtcataatatcataatgcggctgatagcctaaacgtcttaatcgtgtaatatctgcatatgagtgcttaatatctccaacacgttcaactttatgaataatttgtagctcccgattaataatttgttcatacacctgaattacttgattaaggctagtatgtttaccggcaccaacattaaaaacttgatgtacgatgttgctacccttcgtcaataggcataatgcttggattacgtctttaataaagacaaaatcacgcgtttgttcaccatcaccgaaaattgtaaattccgattggtgtttagctgcttgcgtgattaatgacaatacccctgaatacggtgatttaggattctgtcgtggtccataaacattgaagaaccgtaccgccactgttggaatattgtatagttttccataatcaattacaaaacgttcagttgcaaatttatcaattgcatacggtgtcaacggatcaattgttgagtcctcacgtttaggtaattcagaattatttccataaactgccgctgacgaagtaaacaacacttttttaacatttaatttattttgacgaattgtttctaagatgaaaatattcgcctcttgattgatttggtgggtttcatacggccgtgccaccgaatcggcaacactagcaatggccgctaataaatagatataatcaaaattctctttgagtaatagttcttgcataaagtcatggtcagtaatgctgtgttcgtaaaaggtcactttagatgagctaggaatgttactcgccaagcccattgataagtcatcaacaataacgacctcatcgccatcttgtattaactgatcaactaaatttgacccaataaaaccggcaccgccggtcactaaaactttacccaattatctttcctccaaattcaactattacctaaataaccaaaacttctttttttctttaacatggtggtactcactcggctctaagacatcgccgttaataatctttttggcgttgtcttgcatccaggtcaccatttccgccccattatgctgctccagcttagcgaacgccttctgcatccggaaattacggccctttaagttatgtgcgtcagaggcaaaaacaaagcctaagccggcatcaatgattcgctgcgtaaagtcttcgacctcagaaccaaatacgcctaagtagctgctggcggtgatctgggtcaagcaaccgctagccacaaaatcataaagcagatcgtgattcttttgaatgccgtgattgcgttcaggatggacgatcactggtgtgataccggctgcctgcagttcaaaaatcattttgtcggtgtattccggcacttcaccgtgggaaagctccaacatcaagtagcgattagtttcatcagcgaacaacacgtcatcatttttaatggcttgcattaagtcaccattgatatgtgcttcttgccctgggaagacaactaaatcgattttagcttcatccaacgctgcttgaaattctgcagtccgctgaatcacgtcagccttatgattggtatatttgccgtccatgtggtgtggcgtcaccaaaatatgactaataccgttatcgacagccactcgggccatcgctaaggcatcagccatggtatgcgccccatcatcacatcccggtaagatatgacaatgtagatcgatcatttcttatcgtccgttccgtaatacccaccgtagtaaccgccagaagctgcatctgtcacgcggttaagtacggcaccgatcaggttttttgagtaaatcgcgcgcccgtaaaacagcccctttaagagcgataccttgggggaccaccaagatcacgccgtcaaccttacttgctagaatttgtgcatcggtgaccctattaactggttgcacgcccagaacaattataccaaattgttccccaaattgcaagaacaaattagccacacgataaatcctattaaatcagtattttcattaatattcatattttatggacttaacttaaccggcggaagcagcggagaaaagctctttgggtgtttgatagccagtttgccggcgcggtaaaaggtttagttagttacttatttatcttctgtcccgtagtagccaccatagtagccacccgtattttctgctttaacccgattcatgatggtgcctaaaattcgtgcattaacgacttctaacaactcttttgccttggcaaccgaacccttttcaacaatcccttgtggtaccaccaaaattgtcccatcaactttgcttgccaaaatctgcgcatctgttactgaaataacgggtggtgtatcaaaaatcactaaatcaaagtgctttgtcaattctaaaattaatttatccattttctttgtatttaacaattcagacgggtttggtggtacgacaccacacggtaaaacgaatagatgatcaaccggtgttttttgaatcgcactatttaaatcgaaggtttcttccgttaatagtgatgttaagccttttttatttggcacttggaaagtttgatggactgttggacggcgcatatcggcatcgaccaataagacatctaccccttgatcagcccaggtcacggcaacattcgcacttaccgttgatttaccttgcgaagggcctgatgacgtgaagacaacactgcgcaacttttgatcgattgatgaaaattgaatattcgtgcggattgtccggaattgttccgcaataactgaagtcggatcagttaaagtaattaaaccgaccccttctttcatactatcttggtctagtttcttttcttttctaaataatcccattttcttaccctcttcttgataagcggctggtacttacgctcataatcgctttcttgattaaatctttttcagcaatattattaacaatccctagactagttaaccctaattcttccgttaaaaatccttcatcttttactgtcttgtccgttagttcacgtaaaaaggctatcccaactcccagtaatagacctaatacaactccaatcaaaacatatagattctttttgggagatactggatttaggttgggacttgcttgggaaataattgaaacattatcagttccactcataattttaggtgctttcttctgaaaagtctgtgctgttgtattcgcaatatctgcagcagtatacgcattatcagcctttacattaatggagaacacttgagagttttgattatttgcaatatcaatcatatttgcaatttgcccctcatttattttttcatcgttacctttattaatcttttcagcaacagtatccataataaccggtttcgtgattaaatctttatacgttgtaatcatttgaacatcagcttgaacttgattcagctgagcgccaacatcagtattttgtttacggttaactagcaactctgttgaagcgctatattgtggtgtaatcaaaaagaatgtcacgataacagctaataatgtacacaccactgtcgatgatagaattaaccggtgatacttacgtaaaataccgaaaatttgctcaatgttgattgtttgttccatgataccctccaaaagttaattaatgcttataactactttgcaacacgcgaaaagaagttaaccatcgctggttagcttcctcccgtgttattttaaatctaattgggttcttaaaagtctcgacatattcgccacttcagatgaactcatcacttggaaagattgtccgtcaatcatttgaccaattcccttcaattgatgcgtcttaaagttcattgcatccccataatttttctggatattaattgcatctttcaaggtaatattggtttgcatattattttctaagacttgtaaaaaattattataattcgtcaccatattcaatgaaaaagccttcttcaaaactgcttgtacgatagattgttggcgcaactgacgaccaaaatcacctctggagtcttcatggcgcattcgtgaaaatgccaatgcttcttcaccattcaaggatacgggccctacgctaaagtgatgtccatcttgtgtgaagtctaaatcattctcaacagtcaccccatcgaccgcatctactaattgttccaagcccttcatgttaaccagtacgtaataatcgaccggtacgttcaagaaggcttgcacggtattgactaccatcggaatgccaccgtaggcataagccgcgttaatcttagccgtttgaccgtaaccaacgattggcacccgtgaatcccgggcgatactcaacatgttggtttccttagtcgttggattgaccgttgcgagcatcattgtatcagtccggcctttttcggttcggcctagttcccctgtatctgtaccgagtaagaggatcgagaaaggcgtcttcttatttagttcgactttttctgaaactttgcgcttattttgtgtcttacctttggatttatacactgtcttggcggtttgattaacatccatatagaccttagctgcgaatgcgcccccggcaagaatcaataccccaagaacaactaaaatcacttttgttaatgtccaccctctgcgccggtgcttatggtgatggtgtcgcttctgttcttctgcagtcatccgtttcgtatcctcctcgaaaaataaacaaaaaaataatcaatcacattacatactatttacatactatttataatcataatattttctattgtagtataacttttattaaaaagaaatctttttctggagtacaccttaataaaaaacacttagttttcacactaaattgtgaataacccccttaacattgggcagtgattcaatattcaagatttttaaataattaaatatttttaaagtatcgaaagtgaaagtgatttacgaaatctaagtccatcaaaaaaccgatatgtaaaaacattagtttgacatatcggttgagataaataattttaattttagagactaaaaataggttgtaatcatccggttgattcccgaattcttacaacctatataattggttaacgtttcaattcatatttgtgctttgtctcattaatttttcggctgtcattcattttgatcgcgccgacgcgcaatgaagtcatgaaccttaccgcgactggcgttaacatgcccatgcagtgcttcttcaatcacaacattcaagacagccccaaccatcagaatcgttgcggaataattcagccacaagagtaagataatcaccgcaccgattgcaccgtaactattccatgacgtgccgaagtaacgaatatacaatgagaatgcttgtgcaagaattaaccagccaaccgttgtcagtgctgcccctggcagaacacttcgcaatcgcattttcacattcggaacgaagaaatagatgaaaatcagcagtaggaacaaggcaatccccgtcactggccattttaaactactaaaaatattaacgtaggtcttaggaatgttaaagattgggactaataattccaaaatttgttgcccgaatgtaaaaacaacaattaaaccgactaataatagaagtaataataatgtactccccaaagaaatcaggcgttttaaaacaaagttctgaactttttcaacacgatacgcgcggttaatactattttttaaggcattaatccccatgctcgctgcccacaacgtccccaagatcccgacggacaataagccatcattgcgtttcttcaatagggactgcagaactggcataatcttgtcgaatatcgtgggcggcaccgccgtttggacgtaatccgccacactcattacatctaactggaagtacggtaagatgttcccgataacgattaatagtgggaagattgataataacgaataatatgcgattaccttcgaattatcactaatgcttgcttctgatgaacgcaacatcattaacttcaccacagcaatcaacttctgccgtctggataagtcctgttttaccaccggtaactggttttgattgtctactgtcatatgtcactccaaattctcttttacacattagtcgttctacctgaaaggcttattttcccgacttcttaaggcatgtttatcatttctattatacacgaattaactatgggctaatagttttctgaaagcaaaaaaaaaaaccttctcattttagagaaggtttctaattttatagtaaatatttagcatccatttctggatcttgtgaggttagaatcttaggaccatctttggtaatcgcaattgtgtgttcatattgcgcacatggtgtgccatctgctgagacgtaatattcccagtcttcgccagggacttcttttgacttgatgtgccatgtgccacctaagatgaccattggttcaattgtgatggtcatcccttctttaaggcgcaagcccttgcccgcttcaccgtatgaaggcacgtttggttgttcgtgcatcgttggttgaataccatgtccaatcaattcacggacgtcaccgtagctgttttcaacttcggtatattgttggatggcgtggccgatatcacctaggcgattgccgacaacggcttgatcaatgcctaagtagagtgctttgcgcgtatcgtccattaatttttgtaattctggtgcgatttcgccaaccgcataagtccagcaagaatcactttcataaccgtccaagttaacggtcatgtcgacactgacaatgtcgccttcttttagaattaagttcttccgtggaatggcatgtgccacttcctcattcacgcagacacaagttgcgtacttgtagccttcaaagcctttttcagatgctttggcaccgtgttgttcgatgtagtcgtttgcgaattcttcaattacccagctcgaaatacctggtttgatgatgtcgcgcaaaccgcgatgaacgccggcaataatggcgccagaagcagccatccctttaatttctcgttcagattttaatgtaatcaaaatgaaacctccaatattgttaccattgtagcctttaattgtatctatttctatattatacgctatctgccattaaaatggacgaatcgtcgctttttagttcaattaaccgtgaaagagccgttgcaccttttcttaataaggggcttttgctataatgccttatagtataattcgttaattgcggccactgagcgccgcgtacgtgaaaggatgtcccaataatggcaactgctaaagtagtctatgcaagtatgaccggcaataacgaggaaattgccgaaatcgttgaagaagccctcgaaagtttgaacgtcgacgttgaaaccactgaaatctctcaagcagatcctgccgattttgaagacagcgatatctgtatcgtctgcagctacacctatggcgatgatggcgatctccccgatgaagccgttgatttctacgaagatctcaaggatattgatttaactggtaaagtctacggtgtctgtggctccggtgatacgttctacgatgacttctgtaaagtggttgatgatttcgcagccgtcttcgaacaaaccggcgcaacaaagggttcagacgttgtcaaagtcgatctatcagcagaagcagaagatatcgaacatcttgaaaaattcgtatcagagattgtcgcaaaacagagtgcgtcataagctcggtcagtatccgagcactaacctagtctggcacaggatactagcttataaagcacgtttcaaggcagagtgcgtttgaaacggttatgctttgagcattaactggatttgccgaataggtgatgcaatcacctatttggtaaatttggttaagggcagaagtatgtttcaacaagcacgtttcaaccaatcttccctgggccgcggttacgtccctttttaccgcggcccttcttttggtcttttagaccttaataaatcaaactaggagctgtctttatggctttcattaaacggttagtgtttaaataccgcgattttttgacctatacgatttttggttttttagcatcgttggttaatatttttacttactgggtatttcgccacaccattatttggccgtatttactcgccaatacaatggcgtggtttgtcgcgaatttatttggcttttttaccaataagtcgcttgtattccaatccaaatacaccacgtttggcgctgtgtgtcgtgaagtgctttcgtttttctttttccgtggtgtatcctttttcttggataacggtttgatgattgtcgccatctccttcttagggtggcagagtatgaccgccaagattatcgatcagttaatcgtcggcattgtcaactacatcaccacccgctacactttcaaaaaaacagaacaacaaatggcactccggggtcggattctccggcgatacaatgctattttgaaaagaggtcacaatgattaaagccattcaacaactcattcaaaaatactgggaacaattaatgtacttggtctttggtgtcttaacaaccctagtcaacatggtcgttttcttcggattagaccactatacaactatcaattatctcgtcagcaacacgattgcctggttcttatccgtgctatttgcctttttcaccaataaaacgtgggtctttcagtcaaaatatacaactttaaaggacttttcccgcgaaatggctagtttctttttcttccgtggtatatcatttataatggatactgcaattatgtttgttgggatttccttattggtatggcccaacatgcttgttaaagtgctagatcagattatcgtgattttagcgaactatgtatttagcaaatggattttcaaagatacttcggaggattaagatgactaagacgatttcaattattgtaccctgttataacgagcaagaatcaattccgcttttctacgcagcagttgagaaagtagcggctactctagccgaccaccgcatcgaatacatcttcgttaacgatggttctgctgatgaaagcctggcggaaatgcgcgcgttacaggcacaagaccctgaacacgttcactacatttcattctctcggaacttcggtaaagaggctgccttgtatgctggcttacaagccgcaactggcgactacgtttcagtgatggatgttgacttacaagatccgcctgaactattacccgaaatgattcacggcattgaagtcgaaggttatgactgtgtcggcactcgccggacaacacgtgcgggtgaaccccccgttcgttcgttcttcgctaaacaattttacaagattatcaaccggatttcacaaactgaaatcgtggatggtgctcgtgattatcgcttgatgactcggcagatggtcaatgccatcttagagatgtctgaatataaccgtttttcaaaagggattttcagttgggtcggctttgacaccaagtacttagaatataagaaccaagaccgcgttgctggtcaaaccagttggtcattctggggactcttcaaatattcattggatgggattgtaactttctcagaaacaccattagccattgcgtccttcgtcggctttttctcattcgcgattgccctgcttgcattaatcttcatcgttattcgtgcttttatttttggcgatccaacaagcggttggccatcactcatttcagttatcctaatggtcggcggtttacaactcctatgcctagggattgtcggcaaatacatcggcaaaatctacctagaagttaaaaacagaccagtgtatattgtgaaagaaaagaaataaagtgcgtttggttgcacttagcaactgagtattaagacaaaaaacagtttgaatccgcacgtttatctcatcaaaaaaagccctcgccattatcagtcaaaatgataatggtcgagggctttttcaatgctcattatttaaacgcttctggtttttcttttgattgaccaaaatgataagcaattgcatctaaaatccgttgagatgcttgtccatcaccatatggattcttggcatgggccattgcttcatatacggcttgatcatctaataattcaaccatggcatcatgaacttgttctggttgtgtcccaaccaacttcaacgtgcctgcttcaaccccttcaggtcgttcagttgtatcccgtaagaccaacacaggtttgcctaatgacggtgcttcttcttgcacaccaccagaatcagacatgatgaagaaactccgtgcagctaagttgtggaaatcaacaacatccaatggatcaattaaatgaatccgtgggtgattgcctaagatatcttgcgctgcttcttgcacaacagggttcaaatgcactggataaacgatttcaacatcatcatgggtttcaacaacttggcgcattaccttgaagacccgtttcattggttcaccttggttttcacgtcgatgcattgttactagaatcattcgtttgtcagcatcaacaacatccaagattgaatgattgtagtcgctttgaaccgtttgtttcaatgcatcaattgctgtattccctgtaatgtaaatagccttttgtgggtgattttcttgtaataagttggcttcacttttactggttggtgcaaaataaagatcactgagtacatctgttaattggcgattcatttcttctgggaatggtgaatacttatcccaagttcttagtcctgcttcaacatggccaatcgctgtttgattgtagaatgcactaatgcttgctgcgaaagtagtggttgtatccccatggactaatacgatatccggtttttcagttgcaatcactttatcaaggttcattaatacgttgctagtaatttcactaagtgtttgtcgttgtttcataacgtccaaatcgtaatctggtttaattttaaaaatttcaagcacttgatctaacatttgacgatgttgggcagttaccaccgtcacagcttcgaattcatctgagcgttctttcaatgctaatactagcggcgccatcttaattgcttctggtcgtgtcccaaaaacagtcattactttaattttagacacaaatttgcctcctaccatttaataagttaacacctcctatattacacgttttataagggtttgccaatccattgcagtcttattcccttgagtcaaatgaataacagtctgaatattaaaaaggacgcctttttaggcgtctctttttaataacattgcttcaacattcgcttgagcatcgcgtctatttctgcgtcactatagtgtaccaacttcgcattcgttaaggtcgccaaacccgtaataatgatccacgcttcgttaataatgcgttcgtgttctgactcactaaccgtttttaacggttgatagtcctccaatctagtttgtgtcaattgccccatgaaaagttgtgcttcatccttaccaaagtggttatcaataaataacgcacggtaaagttctggttcgattgtagcaaaatgaatatagccaatcccgagattgactaaggcatcatctgttcgttgttcttcactgacataccacaccaaacgcgccttggcttgttccaaaatggcttgcttgagattggccatattaccgaattctaaatagatgggttgtgtcgaacagtctagtgccttggcaaggctgcgcgctgtaattgcttttaaaccatccgctaataccatttcgtatgctttatccagaatttgctccgctttaatccgttttgtccgtgccatcgttcccactccttaaccgatcaatccgtttttcaatattatctactgtcactctaccacaaaattaaataacatgaaaacgtttttatctattttacgagttttttaaatcgccatgtgctatgataaacatattaaatcgcccttaaggaggaatttttgatgactactttccaacataatcttgaaaaatacgctgctttagtcgctaaaacaggaattaacgtccaacctggtgatacagtggttttacaaatcgctgttgatcaagctgaactagcccgtgatatgacagctgcttgctacgatctcggagcagcagaagtgattatcaaatggcaagatgatgacatcgatcggatcaatatgcaacacaaagccgaagatcgcctcgttaacgtgccagacttccagaaacaagaatacgattactggttagcaaataacgccaaacggatttcggtgatgtcgagcaatcctgataaccttaagggcctcgatggtgatcgggtcgctgctgttcaaaaggcaaacggtcaagcaatgcttaaagttcgccaagcaacacaagccaacaaaaatagttggattgtaattgccgcagctagtcccgcttgggcaaagaaagtctttcctgatatggacgaacaagccgcaactgataagttatggacagagattttcaaaacaacccgggtagataaagaagacccaatccttgcttgggaacaacatggcaagaaactgcaagccaaagccgctgaattaaacgctgcgcaatacaaagcactccattacacagctcctggcactgatctcacaattgggttacctgaaaaccacatctggatgggtggtcctagccgtagtagtgatggtcgttcattcgtcgctaacatgcctactgaggaagttttctcagcagctgatgccaacaacgtcgatggctacatttcttctacgaaaccattgagttacgctggtaacacactcaataacatgcaatttacttttgaaaacggcaaagtggtcaaagccaccgctgaagaaggcaacgatgtcttacaaaaactcttacaaaccgatgctggggtcaagagcctaggtgaagtcgcacttgtaccagatccttcaccaatttcacaatcaaagatcaccttctacaataccttatttgacgaaaatgcttcaaaccatttggcactcggctctgcttacgccttttcaattgaaggcggcacagatatgtctgaagaggaattaaaagcagctggtttaaaccgtagtcaagcccacgttgacttcatggtcggttccagtcaaatgaacatcgatggcttaacacacgacggtcagattgtccccattttcagaaacggtgactgggctgactaatgattacatggctcatgctccttggcgtctgcgtttgtctaaccaccttcttcattggactaaccgcctatagcgcctaccagaaacaagcgattggtggtctaatcattgtgtgcgttgccggtttagtcttaaccgcaatcgcggcattcttctactaccaagcactgacgcatttataattcgaaagggtcacgacaaaatttttgttgcgaccctttttgatgtgctagactgttggcatactttttgttcactatatcattattcgttagtaataatgattcgtatgtactggtataacaggttttatacaatgtttttgttgtgaacaattgctcaaaaacaattgataatccttctcaattagctataatgaagttaaatcaaccagaggagtccgccattatgaaagaattatccgccagtgcaccacttgaacatcgtttccatttatcagaacgtttgaacattatccgcgccggcgttttaggggcaaatgacggcattatctctgtagctggaatcgtagtgggtgtcgcgagcgcccaccaaagtcagtacacgatttttcttgctggtatttctggcatgcttgctggcgccttttcaatgggtggcggtgaatacgtctcggtcagcacgcaacgtgacacgcagaaatccatgatgcggcttcaaaaagaagccatccaaaacgaatacgctgctgaagtggccagtctacaacggacttacgaatcaaaaggcttacccactccacttgcacatcaggtagcttcagcgttcatgcaaaaagacagtcttgacatcacactccgcgaaaaatacaatattgaattacaccattacttcaacccgtggcatgccgccttttcatcatttttctcattcatgttaggctcattgctgccaatcatcgccatcctagcaattccatacccttacaaagtcagtggaactattggttcaattgtccttgcccttatcgcgaccggttacacgagtgcaacgttaggcaaggcaaaccgactcaaaggtgttttacgcaacgtcttaaccggcgtcttaaccatggtcgtcacctatttaattggtggttctatcggctaagcttcacttttaacctaaaatttgctatgctatatttaatttaatcgtcgccacggggcagttaatcacttcattaggtcaaagaagaagtgattggctgtcctttttttgtggccgatattattaggaggttctattgtgtggcatgggttgatttattgattgcaggattggcagaagtttggtgggcaacgactatgaagatgagtggtgggttcactaagctcaattacacattactgacgattgctggcatgctcgtcagcttcggttttctaattcgtgcgacgaagggattaccattgagcattgcttatccggtttggaccggaattggcgcagtgggagctattttagtcggcatcatcttattcaatgaacacatttctttattaacctggctattcgttattttattagtaatcggaattctcggcattaaaatgacgagtggtcattaaaaaataggcttacccattttgggtaagccttatttattaacgtgttctaattgccaactcgcgatagtttgaatcaactcgattggtaatgccgttacatctttttcgaattgtagtgtccctttgccggtctgacatggtgcgacagcttttgcaaaatgggccatcggttgattagtgggataaaacccgatgtgccgtttattaatgccaaaatagcaaactgctttaggctgataatacccaaccaaaccataagccagcttcatctctgcgtccggtaacactgcccaaagaatggtgtgcattgccagtgcgagtgttcgatcagcatcagttgtaaggcctgcattatattgctcaataactgtcatcttatccccacctttattttgctctcattctagcatgaaaccacaaaaaaagcccaaccgaagttggactcttgaaaaacaataattatttaacagctggtgtaccgaaccattcgatacgtgattcaactgtgtctttgattgcttttgtacctggtgcaagaactttacgaggatcgaagcctttttcagcttgatctttgttttctgcatagtattctttaacagcgtttgaccatgcgatttgttgttctgtattaacgttaacttttgagatacccatttcgattgctttaaggatttgttccttaggaatacctgaaccaccatgtaatacaagtggtaagtcaatagcgtcagctaattcttgtaaacggtcaaagcttaaaccttgccagttttcagggtatacaccatgaatattaccaataccaactgctaagtagtcaggaccagcagctgctaattgtttagcttcttcaacgtcagctaattcgccagcaccgatgataccgtcttcttcgccaccaattgaaccaacttcggcttcaactgagatgcctttagcatgtgctaaagcaacgatttcttttgtctttgctaagttttcttcgaatggtaaatcatgaccatcgaacataactgagttgtaaccaacttcgatacattctttagcagcttcgtagttaccgtgatctaaatgcatgataacaggaactgtgatgttcattgacttgattgtttgttcaaccaagttcttgcataattcgtaaccacccatatatttagcagcacccattgatgtttggatcaagattggtgtgttagtttcttgagcagcacctaagatagcacgtgtccattcaaggttgtttgtgttgaaagcaccaacagcgtaatgaccttcacgagcagctttaaagatttctgtaccattaactaatgacatgaaaaagcctccagattaattgcaacttttgcgttgcgatttttgaatacgaatctattttaacatattttgacctaatataaatcataaatccgtaactttctgaaagtgaaagcgtaatcattctgcttgattattttacaccaattaaaaagcacactagttaatctagtgtgcttttacgacaattgcttcaaagtgcgcccggcgagaatcgaactcgcaacctatcgcttaggaggcgattgctctatccagttgagccacgagcgcctatgagtcatattgtcgcatctgttgttttaattgtaaagttgattttaataaatctttattcatccgttaaaacggcgttcatcgtttcttgacctaaaaagaacacggcaccagccgctaatagtatcgcacccgtaaaaagtgtaaaaatcacggctactgataccccctgctgaattagcgcaccaactaaaaatggcccaaccacaccgccaattcgcccgatgccagctgctaaaccactcccacttccacggacaagtgcaggatattgttctggggtataagcatatagcgccccccatgcaccaagattgaaaaaggataacagcgcaccggccacgagtaacatggcaactgagtttgcattgccaaacaataatgcactgagtgctgttccgattagaaagccacctaaaacacgtttccgcccccatttttcaatcaaccacgctgctacaaagtagcctggtaattgtgccaaggtcataatcagcacatattcaaaacttttaaccaagctgaacccttttaagaccatcacactggggagccataaaaacatcccatagtatgaaaagaccactaaaaaccatacgagccataacataattgttctttggcgatacgctggttcaaataaaacacgcaatcgttgcatgaatggtaccttacggttaatcgtcgtcggttcatgctcttgtttaacatgtttccgtaacacaagtgtgtagatggcgggcaatgacgtgatcaataagaccactcgccagccccaaactggaatgacaaaataggcgagtaaactggcaactaaccacccggctgcccaaaaactttctaacaatacgacagcccgaccgcgcgatgccgttggcgtattctccgagattaatgtcgaggctaccggtagctcgccacccaacccagcaccgaccaataaccggagtactagaaatagactcaacgatgtactaaaggcagatatcccattgccaatcgaaaatactaataaggaacaaagtaaactgttttttcgaccaattttatcagctaaaatgccgaaaatagcggcgccaaaaaccattccaattgaactgacactcccaattaatcccatttgtgcactactgagttgccactctcttgcaagcgcagcaatcacaaacgatagcatccccacatccattgcatcgaacaaccatgcaccacctgcagcccataaaagtgtcctatgttcttttgtcatcccgcattactcccttatgttatgaatggtcctatcatacaaaaagagtttacagatgtcaagacacctaattatgcattataataaatatttatctgtttaagcgctgcgacaatttgcttaaatcgttgttctgacgcgcattcaatcgtgtgtaaatgaatgccgtcggttaatgttgaaagtaatttctgatggggcattgtggccattttttgcataaagcctttgacatctgtcaaggtgccgattcccagttgaccggtcagttcaccatacaatggatgatcaacggtcacgtcgatcacgcgccccccattttcaacaatcgttgtcaattcaagttcagtctgcccctgattatgctgacaggcaacttgtgcctgatatggcattgtttgttgcgtctgcgtttggtcgtaataaccgctaactgtcgcaataatttgggccccttgtgcgcgaagtaaggcgatatccccaacaattgtctgccggctaactttatattgttgcgctaatactttggcactgatgggttgcgcactcttttgaattgcattcagaattgctgtacgtcgttcttgcgttgtcatattgccacctcgtcttgatttcttacgctatattctaagcgttctaaaggcaaaaagaaagtggagggttgaaacgaactcgtttttccggttaacctaaaaatacatattatggcttaaacccgccataatatgtatttttctgttaatcctcaaagccaacccgttcgactattaaaacaaaaggcaggcgaaatcattttgtgatttcgtctgccttttttaattagtgctcagttgctgaccgcaattaagggcactcttattgaaacgtgctgtttcaaactgccttttccggttaaccaaaaacgcgaatcatgacgaaaagcgtcataatccgcgtttttaagttaatcctcaaagccaacccgtttgaatcagcactcttagaatgtttgtagttcttttgtcatgtgtgtgaaggcttctgatcctgtttctgttacgtggacacagtcttcaattcgaacaccggcaacgcctgggatgtagattcctggttcgattgagaaacacatgcctggcttgataatcatgtcgttgccttccatgattgatgggaattcgtgttctgaagttccaatgccgtgacctagacggtggatgaagtattcgccgtagcccgctttagtgatgacgtcacgtgcaatcttatctaattcagccgctgtgataccgggtttgattgctgcttgggcagttaagtttgcttcaagacagactttgtggatttcgagtgatttcgcatcaggtttgccaaaagcaacggtccgcgtcgcatcactcatgtaacccttatgcaatgtcccaaggtcaaagagcacgagggcatctggggttaaaatgttggcttcggggccaccatgggggttagctgcgttgatacctgattgtacgatggtatcaaaactcatatgcataacgcctttgcgcattaatgcgtattcgatttctgcaacgatatcttgttctgttttacctgcttttaaggcattgaaaccaacttcgaaagcataatcggcttcacggccggctgcttccattaaagcgatttcttcaggtgttttaattaattttaagttttccatgaaacgtgaagcgtcgcctgggaatgttgcgtctgggaattgctttagaatagcttcgtaacgttgaacaggaaggtcgtctttttcaagtgcccaacgtgtagggttcgcattccgtttcttgatttgatctgcgatgattgcgtatggatcttcgtgatcgagatagccgtaaacgtcgagtttccagccagcttttttagcagattcaacttctaattgtggtgtaaataggaatgggtcctgatctgcaaaaacaaagagggctaagacccgttctgcaggatcactttcgaaaccagtgaaatagaggatgttggttggattactgatgtaagccacatccatattattctcaccaagccaattttgtaattgggctaattgattattcatctaaagcacttcctttacaattgatatcactagtatatcacaaccaatgtaaacggtaatgtaaaccacaaatgaaaacaaaaatgtaaatttcatgaaaattagtgtaaaccgcttgcatttgctttaaatctctgttaaattaatcaagaagtaaaatgaaaactgctgaaaatataatctattttattttacaaatgaaaggaatcatttaatcatggaaaaacaaacaattacaatttatgacgttgcgcgcgaagccgacgtttcaatggcaactgtctcacgagttgtcaatggtaacccgaatgtgaaacccgcaacacgtaagaaggttcttgaagttattaaccgtcttgactaccgtccaaatgcggtggcccgtggattagcaagcaagaagacaacaacggttggggtcatcattcccgacgttagtgacatctattttgcatcacttgctcgtgggattgacgatgttgcgacaatgtacaagtacaacattattttggctaactcagatgaaaacaaccaaaaggaagttcaagtgttgaataccttattggcaaaacaagttgacggtttaatctacatgggccacagtatttcagacgaaatccgcgctgaattctcacgttcaaagacaccaatcgtgttagctggttcaattgatccagacgaacaagtgggtagtgttaacatcgattacgttgccgctgttaaagatgcaactttgaagttaatcaaaaatggtcatgacaaagtggcgttcgtttgtggtagcttgaaattcccaattaacagcaagtatcgtttatgcggttacaaggatgccttgaatgaagcaggcattgcttatgacgaaagtttaatttttgaaacagaatacagctacagtgctggtgaagcattgttcagcaaaatcaaagcaactggggcaacagctgctgttgtcagtgatgacgaattggcagttggtgtcttgaacggggcagttgatgccggcgttcaaatcccagctgaattcgaagttgtgacaagtaacaacacgaagttaactgaaatggtacgtcctaagatgacgtcaatctcacaaccattgtatgatatgggtgccgtagcaatgcggcttttaacaaagatgatgaacaaagaagacgtaaacgacaagacaatcctattgccatacagtatcgtagcaagagaatcaacaaaatagagtgctattggttgcggtcagcaattgagcattaataaaaaaatcccgttaatccaggttttaggattaacgggatttttagattaagcggaagttgttgcaaacaagagcacgtttccaccaatcaaaaaaggcctcagttccaaacgattttaaatcgttagaactgaggcctttttttagtttagttcgttgtctctgtatctgttggattggtattcgctgtataattcgtaccggttgtagtgccagtcgtagcagcagtaccagttgtgtttgctgtgtaattatttgtcgttgttgctgcggtgccactgcgacgactactgtagccactagttggatttaattcatcagcggtgctataggtaattgaaccatagccgttgttataacctaaatagtggttccagaaagtttcgtagttccgggcagaaccgccaatcccgaattcatagctagttgcttttggcgtccagttgttataaagcgaggtgacggttgaaccgttcaagttctgtgagctgccgttgattgaaaccgtgccaggtaattgaccagttaatttcaagactttgctgcttgtgaccgtacttggcttttcatgatcatcttccaaacgcatgaggcttgggttgatctgataaacgctgttggccaattttgaccagtatctttcattaatctggcttgagttgtcagttaagttacgaccagtactgtcataacccatccatgaagcgagggtgatcccaggggtactcccgataaaccagatatcgcggttatcatttgaagtcccggttttcccaactaagttgttggtattaaagtagagttgatcgtaaattgaagtagcagtcccatctgttaaaacgccggctaacatttggttcatgatgtacgacgttgcttttgaaaagacgcgtttcttcttagcgtgatgttggtaaacgacattaccggcgggatccgtaatcttttcaatcacgtaggcgtcggtatgttcaccttgatccgcgaaggttgaaaatgcactggcctgttctaagacgctgaccccatcactggtcccaccaagtgaaatccccagttgactgtattcatcagcggtgaggttgatgcccatcttactcatgtacttagaaggatctgttgtgttcttcaaagcgttataaaggttaacggttggaatattcaatgactgggctaacgcttcgtcagctggaatgaatttgttctggatcgtgccaccgtaatcggttggtgcgtaatccttgaagttggtcttgaaatcggccaacatcgttttagaaccaatcagtttctgatcgattgctggaccatagactaacaatggcttgatagttgaaccaggagaacgtttggtcaacatgtagtttgtttgtttgagtgagaaatcacgtccgccgacaaaagaaatcactttcccagtgcggttatctaacaagacgctcccgttttgaacaggggacgaaacggtcttttgtaaccccgtttcttcgtcagtaacggtatcggtataagtccgtccgaatgttgcgccctgttggtgaacaaccccttgcatggcatcgtaaatttcttgatcgatagtactgtgaatttgatagcctttagtgctgagtaattcagttgcttgtgtttcatattgtttgtagagatttggatctttgttaagtttggcagttgaaacattggcttctttggctaactgtttggccataatatcagttgcttgtgtttcaagtaagttataaacatagccataactcttcgttgtttcggctggatcggcttttggttggaattctttggttaagtcgactttcttagcggctttgtattcagcctttgtaatgcgatcgtcacgatacatccggaataacacggtatttttacgatctagaccatattttaagtattcaggatctttaagggtgccgtcttgatcatatggtgtatagacggaaggactctgtggcagaccagcaatgtaggcagcctcggctagagaaagatccttagcatttttgccgaataggcccaatgctgcttcttgaacaccagcgatattttgtcctttattgttacggccaagagtggcaacgtttaagtagtcttgtaagatttcttttttagtgaaatacttatcgacccgcaaggcgagcaagacttcggttgctttccgtttaaaggttacttgggaggttaaaacctgcatcttaatcaattgttgcgttaaagtcgagccaccggtttgtgaaccaaacccagtgacatcggaaataacggcccgcaagagtgctttggggacaaccccatcgtgtttatagaaatcctcatcttcggttgcaacaatcgcatcctttagataaggggacatctcatggatgttgatgggagtccgaattaagtcggttttgattgcgccgaacttattgttcttggcaaagtataaaccggctgcttgatcggtattatcaagttgttgctttagcacttgataactaggaattggttcggatttcattaacgcagcaaaatagcccgcgccaattccagcagcgagcgccatacagattaagctaattgagatcccatagagaaagatactcttaatggcttcaaagaagacgttaatcttaaaagagagtggtgattggctcaactcttggatgtaggctcttttttgttccttagttggttgtgcagaacgtttatcgggtaaatggagcaaatgtgcgagtctgtctttagcagatgtcaatagcgttgagaccttttgtctgctcgactggagcagtgctcgccatcgactggaacggtgctttggatcattcaaataataacgccaccttttttctcatactgtcccatattatataatagttcagcgcattatcatacccgatttcggatttgtaagacaaatgaaaaatatccagaaatgcacggcaatcaatgaatatagtgcaattggttaacaaatttgaatcagcagacacaaaaaggggggcgtttgctagcgattaaaagtaagcttttaacgaaatgccgtgaaaacgctaaacgttaggtataccaattatttagcgcgttttttagcgtcaaaaggcttgcaattgaaattttagccgtttataattggactataccaatgaacgacttgaatttttaaatgatgaggagataatcatgatgaaaattattaaagtgaaagatcaagtagaaggcggccaaaaaagctttgaaatcttcaaagaaggtttagcaaacaacgctaaagtattcggtttggcaactggtagttcaccaattaaattctacgaaacattagtggctagcgacttagatttcacaggttgcacatccgtgaacttggacgaatatgttggcttatcagctgatgacgaccaaagttaccactatttcatgaagaagaacttattcgacaagaaaccatttactaaatcatacttaccaaacggcttagcaagcgacatttctgctgaattaaaacgctatgaccaagtgattgctgataacccagttgatatccaaatcttagggatcggccaaaacggtcacatcggcttcaatgaacccggtactgcgtttgacagcaatacacaagaagtgcaattaacagaatcaacaatcaaagctaacgcacgtttcttcgaaaatgaagcagatgtaccaacaaaagcaatctcaatggggattggctcaatcttaaaagctaagaaaatcgtcttgttcgcatatggcaaatcaaaagctgaagccatcaaaggcacagtagaaggcccacaaacaacagacgtcccagcaagtgcattacaactacacgacgacgtgacaatcatcgtagacgaagcagcagcaagcttgttaagcaaatagagtgcgacagcaggcggttatgctctgaggattagtggcatatcgtgaatgagcggcaaagccgatcgttttcgatatgtaactaaccggaagagtatgcctgatggagcccgtttcaaaataagagtgcgtttgaaacgggtatcttctgagcattaactggatttgacgaattgacgatgaaatcgtcgatttgccaaatttggttaagcgcaggaagatgtttcaaaaagcccgtttcaaaacagagtgcgtagccagccgggtatatcccgaggattaacacaggatggcgaatgattgcgtcagcaatcgtttgacattcagggttaaccgcaaggatatggatgacggagcacatttccaccacaaaaaaatcccctacatcaaatcacgatgtgggggattttttgattgcattatttcaatgttgccatcactttagccattgcggcttgttgataggcgattgctgcttttttagcaaccgcttgttgttgatcagcagtcattgctggattggcttgcatagcagccatcacagcttgtttaccggcattttctgcgccagttttaagttgttcttgttgaccttttaatgttttagcgagttgtttagcttgaacatcacttagaacgaaccagcctttagcaaccttaaatgtgttgtgacgacttacgaattcgtggtcgttaccagaaattccgaaccagaatttagccgtattattttgataaacgcggtatttggtggttgtcactaagactgctttatcagcatttttttgaacactgttggttgtcttttcagtttgggttgctttgggtttactttggttggcatcggtccgataaagatagactttttcagtgccgttaccaagtgggtgatagagaagcattgacatgcccttcgcgtctgcgcttgaaacgagcgtgtgcgtcttagtttcggtcacagttttcattccgtaatgattgtgatcattttggacgatgaaaacgagtgaagcgataaatgtgagtccaaagatggtcattaagattggtcgccacatcttttgaccgaaaatcgatgaaaagaataatgcgagtgtgctgataacgagtgtaatgacgatcatgccttggcacccccattaatcgtagatttctttgaagagaggaagaatgtgatgatgaagccaatcacacagaaaatcacagcaacgatgaaggctgcgtgataaccagaaagggtggcatcaatcatcttatcgcggaaggccaatggtaatgtcttgaccatgtgtgtgcttggcatattgccttttgtaacactagaaagcacactgattaagatggctgtcccgattgagctggcaacttggcggaaagtattattaacagctgtcccatgactaatcaagttcattggtaaagcgttcattccggaagttgtgacaggcatcatcaccattgaaatcccaaacatccggacagcgtataacacaacgatgtagatgattggggtagtagctgttaggaagatgaatggcgcagttgcagccatcaataagaacatcccggtcattgctaagcgtttggcaccatatttatcaaaaatacggcccgtaattggcatcataatccccatcatgagggaaccagctaataacgttaagcctgaatggaaggcagattcgccacgaatgttttgaatgtatagtggcaagaccatttcggcaccgaccatcgccatgttcgtcacaccacttaaaatagcagcaattgtgaagacaggtgatttgaaaacgcggagttccaagaatgggttttccatcgtgagttggcgccagatgaataaagcaattaccacaacgccaattgctaaggttgtgagaacgagcgcatcgccccagcctttatcgccaacttctgagaagccataaagcaagctcccgaagccgacagttgataaaataattgaagggacatcaattttaggttttgaaagttgaataacactcttcatttggaaactagcgaggactaagacgagaatcacgattggaataatcatgccgaataaaacacgccagttgtatgaatcgataatccagcctgaaagggtaggccctaaagcaggtgccaggccgataacaatcccggccatccccatggctgttccccgtttttcaggtgggaagatggtgagcataatggtttgcaaaatgggcattgaaatcccaacaccagcagcttgaacaagccggccgattaatagagttgcaaacgagctcgttggtgcgatgtaacagataatagtcccgattaagaagacagtcattgctgacatgtagaggacttttgaattgaatcggttaattaaccaagcactaatggggatcataatcccgttgactagtaagaaaccggttgtgagccattgaacggctgaggtggacacatcgaatgctttcattaatgtggggaaagcagttgataaaatcgtctggttcaagacggtacagaaagtaccaatcaataagaccaagactaagactgtccgattatatggtttcccatgaatatctaatggtctagcgtctgacaagataaaaatctcctttgtgtgtttttgttgatgcgatttattagtttagacgcatttggtatctttgtcaagtaagttgacaaatgtgttatttaacttgacaatcccaatagattatctataatgaaaaataataataggaatggagtggggacttgcaaaaagacctttttttaaagttaatagatacggatcgattgatttttgggattagtgaagtttgtaaaatggcgggggttacaccgcgtcaactccgctactgggagcaaaaaggatacattaaagcgcgtgaattggatggcaataaggcccgcgagtacgacgcgcaaacaatgattaaggcgatctttatcaagcatttcttagatgaaggctacacgctaggggttgctgtacagaaaattcaaaaacacatggataacatgaaggttgttcgttcgataattcgggaacattttgagggaattgaagagattgatgacgaaatggctgttaatctcggttacttcgatgaaacaaagcaacaaatcttatacgcaattgtcaaagatgggcattcaacgtttaagctgatgcctgctgataaatgaaggcaatcaaaaaaacggtccaaagcgattaagctttggaccgtttttttgattgctaaatgtgttctatcagccatatccttccggttaaccctgagccgcaaacgattgctacgcaatcattcacaactttgtattaatcctcggtggatacccgacttacgtcacactctaccttgttaatctgtaaattgcatctgcatagattgcaatggcattcatgatatcttcaatgtgcatatattcatttgcttgatgcatcacattttcgcgttcttctggtaaggcaccgaaagcaacaccacgttctaagatacgaccatatgtgccaccaccgataacttgttcgtgacctttaagaccagtttgttcttcgaagacgcttaataatgttgcaaccaatggatcgtcaccaggcacgtaatgtggttcttgtgcatgaccgtcaattgttacgtcagcaagatcactaagtgtgtttgctaaaccgtcgcgtgtgctttcagcagtcacacctttaggataacggacgttcaagagcactgttgctacaccatcttgtgtgtagttgaagactgcaggacatgctgttaagtcgcccatcacatcatctgtgtggttgatgtttaagaggtgcccacgtgaatcttcgtgcattaagcgggcaattgttccgatgtagttgccacctttagtatctaaggcaaagtcagctaagaaagttgccaagtgtgttgcagcatttacgccggcttttggttcttgagcatgtgaacctttaccgattaagtcgatgattgtttggtcaccgtcagttgtgattgtcccttgtaacttgtggtcggcaacataggcgtcaaacttagcttggaaatcagctggcattgcacccgttaagatggctttagctgtttgtggcaccatgttggcgcgtaaaccagatttgaagctaaccaatgtcatatcgccatcagcaccgtcaactggtttgaaagtcatgaggtatgacacaatccctttttcaccattgatgattgggaagtttgcatctggcgaaattgcaaagtcaggttttggttcaacttcgaggtaacggttgatcccaacccattcactttcttcgtcagtcccaacgataaagtgcacttttttgtttaattcgataccgttgtcttttaataatttcaaagcataatatgctgcgattgaaggccccttatcatctgatgaaccgcgggcataaatcttaccgtctttgatcactggttcaaatgggtttgtttcccaaccgtcaccggcaggcacaacgtccatatgacctaaaatcccgaatatttcgtcgccactaccgagttcaatgcgacctgcaacgttttcaacattctttgttgtaaaaccgtcgcggtcagcgattgctaagaattgtagcaaggcatcgcgggggccagggccaagtggtgcgtcgtcttctttatggtcaacgtcgcgcgcactattaatcttgagtaaacttgttaagtcagcaagcatttgatccttatactttgctgcttcttgttgccaattcaatgtcattgcagtcccagctttcattgttaaattttaaccaaaaaacggttaattaattattaatctattcacattttagcatattattacaaatttaaaaagcgcttgccattaaaaaataaaaggttcacaaagtctccatgaaccctttaaggttagtgcttctttaaaatccgaagtgcgtttaaaatcgcgattaacgttaccccgacatcggcgaaaacggcttcccacattgtggcaattccaaaggcgcctaataataagaagatgcctttgaccactaatgcgaaaatgatgttttgccaaacgatgcggcgggtgtacttggcgatcgaaatcgcagttgctaattttgtcggttcatcggacatcaagacgatatcggcagcttcaatagcggcgtcagaacctaacccgcccatagcaacgcccacgtcggcacgggctaaaacgggtgtgtcgttgattccgtcaccaacaaagacgatttttccgttggtagcgcggtcttctgtaagtttggcgacggcggccactttatcttgcggcagaagttcgctttgatacttatcgatacctaagacggcgctgacttgttgcgcaacgggttggttatcgccagtcaacataattgtttgatgaatcccggcgtgttttagctgcgcgacagccgtttgtgcatctggtttgacggtgtccgcaatgacgatataccccaagtagcggttgttgtaagcaacatggacactggtgcccacttcactaggtgtgagtgttgcgatgccactggcttgtaaccaactagccttaccagcttgtaaaagttgtccgttgagttgcccgctaatcccgtgaccagcggtttcttggacgtcagataacgtctttgtgagtggcgtttggttagctgctaaaatcgattgaccaattggatgggtcgagtgttgttcgacaagggcagctagtgctaaaagttcatcaggttgttgatcgaccgaatgaacggtggtgacgctgaaactaccttgggtcaatgtcccagtcttgtcgaaaacaacggtttggacatcgtttaaagcttcgagataattactccctttaaccaggatgccgtttttagaagccgttccaatcccagcgaaaaagccgagtggaattgaaatgacgagggcacatggacaagaaatcactaagaaaatcaatgcccgatagagccaatcgccaaatggagcaccgaataaaaggggcggtacaatggccatgatggctgcaatgccgacaacaattggtgtgtagactttggcaaaccgcgtgatgaagttttcagtaggcgctttttgactgcttgcattttcgacaaggtctaaaatcttagcgatggttgaatcagcataaggtttcgtgacttcaagcgttaataaacctgattggttaatcgtcccactgagtagttcatcaccaggatgaaaggcgcgaggaacagattcaccggtaatagctgaggtgtccacgtaactgtcgccggtagtaatcacaccgtcgagcgggactttttcccctggtttcaccacgatgtgttcgccaacctgaattgcttcgggtgcaacaacttcggtggtgccatcagccgctaaccgattggcgatggttggtttaattgccactaagttagcaattgagcgccgggaatgattaaccgctaatgattggaaatattcaccaacttgatagaataacatgacaccaacggcttcggcatattgtccgattccaaaggccccaatggttgcaattgacattaagaaatgctcatcgaaccattcgccgtggagaatatttttgattgcggtccagacgatatcgtagccgatgactacaaaggcagctaggagcaacgtggttttagctggcgcgcttagagggacaagataagaaatcgccaagcctaaagagctgacgagaattcggatgagatcataattaatcgcatgttttgcgggggatggttctggggttggtgattgttgaatccccacatctggttcaatggttggcaaaagagtagcgagttgttgttcgaattccgtaacagcttcttggccggtcagttcatagtttaatttttgagtggtgaaattgacggagcaacttttaacgttggccatcttgttaacgttcttttcaattttagtagcacatgcggcacaatcgatgccggttaattgaagttgtgccatgttatttaggcctccttgttgagtgaaaagctaaatcgtaatctttactaaataaacaaacatatgagcatatattcatatgttgactataagataccaccaaacacgatagaatgcaatcgagatgatgggtttgggacattaaaaaaagcaccgaccaaagtgaatttgatcggtgtcaataggatccttagtgttcgttgacgtgggcgataacttgcgaaaagatattgatgacatggttgtcagctaatgaatagaaaacttccttgccttctttacgactttttaccagtttcgcttgcttgagtgcacgtaattgatgtgaaattgaggattgcgacatctctaacacactgacaatatcgctcacccgcaattcggattgaaagagggcgtacaagattttagcgcgtgttttatcgcctagtattttaaaaagaattgagatgtgatcaagtgtttcttcctttggaagagtattttggacggaacgaatcaattgttcataatcggatgtcataaaaggtgacctcgttagaatttaatggtagttagttgtagagaacgggcaaactggttaaacagttgtgtgtcgactggtggttgttggggcaattgcagtggcagtgctgggttaatcagtaagttggttggccgcaattgttggggaatttcacggtaaaagtgggttaccatcagcgattggtttgggttgaagtcgattaatgcttggcgactcttgaaccaaccactagcgactttcaaccagacttgattaccaacatagcgcactcctaaaatttgctgttgtgaattggcactaagataaccggttgtctgggtggggtgtagcggattattccaagtagcgacaatgttcgcagttggtttaatctgcgccgttttacccaccaataaagcagcggctttcgctgtttcaccgacgttgatgctgtcgctgaggacaaagcggttagtgccaatgcggtagtaagtttgatcggcaattgtaacggcttcggtgatgttgtagatatggcccgctttagccggctttttattgagggttggttcatatggattttcaacggtggggaggtcttgaacgtcattgacttgcccaattgtgtcgatggcttcactttctgcttgatcctgtgcggcctgatagtggcgtcccagtgccggatagttcgtgaccacgccgtcgacatttaggttgactaaccagttccaagtcgcttggttttcagacatctcattccagacatacactttttgatggagataatggagctgtttaatgatggttggggtgacgagggatgatgagatgttaatcccgtcggcgtatttaaaactctcgaatgagatccgctgtaaactgccaacgataaaaatgcggggaatctctggcattaaacgttgcatgttttgcagactagcgagggaaaaggaatggaccataacgcggtcttgcatgtgatattgttgaatcagcgccacgagttttgcttccatgtcctgcggatttccctttttggttttcttggtttcgatgaggaatttcgcatttgggttgttttgatagtgctcaaataattgatcgacgctgtgtggtggttccccgttactcattttgagttcactgagcttggcaaaagtattttgcgaaacaatcgcatcggtccccgtgacgcgttgtaagttacggtcgtgggagatgactaagacgccatcttgagattcgtgtaaatcgagttcgacatagttagcgccttgcgaaaaggccatgtcaatactttgaaatgtttcttcgggtgcgttgatggggtcgccacgatgagcgacaacggtaaaaccggttaaaaaccagaaacaaaggcttgttaatactaaaagcccccatcgtgaatgttgctgtgacaaatcaatggcctcctcaattgataaaaactactctttttaagataccattattcctttcaaatgcctacgattgttacagaactttaaagaaacggataaataaattaaaaataacaattgacaacgcttacattaggcggtatattatgtttgtaaggtacttatgcaattacctttttatcaattctctttctctcttatgccaaccactatctgcgggtagtggtttttttgtgtacatattggtagaataaacgtaactgaaatcggattagaataggaagtaacacaatggcggagaagtaccaaacatttgatattattgaagaaattacgcgcttagatggcacaacgtattatgaattggctaacatctttatgaatgggcgtgccgaactagcggctaaccggggatttattaagcaagtccggattttacaactcaacattccgcattcgaatgcggtccaaacttacgaagcttacattaatgaacgttacacaatgcctgcggttgattttgaccactgggaagaatgggaaaaagaagacggcgcagttgcgcaagcctttcaggagattttaaaagcaaatcatattggttaggtgggattgtgaatgacttatttcacagcggatacgcatttttttcacgccgaattattaggtaataatgattttgcgccgcgtccgtttaaagatgtagctacgatgaatgcaacgattattgctaactggaatcaacgggtgcaagctgacgaccaggtttatttgttgggtgacgtcgcaatggtgcccaataagccgagtgcttttgctgaagtcgctgctgtgttagagcagttgaatgggcagctgattattattaaaggtaatcatgataaccgtgcttttttgaaatatttggcgaaacatgatgcgggattatcagctggcaaggcgcattatcaatttgctgatgtcggtgagctaattaagatcaatcaccatcagtattttttaacccactatccgttattattgggaaaggtccaacagacgttcaacttgcacggacatattcatcattatatgttgccgattgcagagaatatcaatgtcgggattgatgcaccagagcgcgaattattacctgaacgggtgccgtttggaacaccccttgcggcaaatgagattgaaatcatttttgaacgcaaacaagccgcgctggcaaaccccagccacgactagctgaagggagtaagcaaaatggaaacaattcatattttacacacgaatgacttacattcacattttgaaaattggcccagaatgcggcgcttcctcttagaacatcaagcagcataccgaaagcaaggggatacggtcttgaccttcgacatcggggatgcaatggatcgtagtcatccattgactgaagcaacgaatggtcagattaataccgagttactcaatcaaattgggtatgacggagtaacgattggaaacaatgaaggaatcggtaatagtcatgctgatctggaacatttgtatgataaggcgaatttcccggtattactggctaatctgtatgaacaagcaacaaacgaaaggccagcatttgcgcaatcttaccgactaatgacgaccgatgctggaacgcgggtagcaattattgccttgaccgcaccatttttcttaacttatcggccgaatggttgggaaccgacgactgtcagtgaagagttgccgcggcaattagcggcgattgaaggtcaatatgacatcttaatcgtcctatcacatcttgggattacgactgataagtggctggcggaacaattccctgagattgatgtcgtctgtggtgcgcacacgcatcatcttttagaagaggggctgctggttaatcaaaccttattgacggctgccgagaagtacggtcattaccttggtgatatcacgcttgaactggatgatcagcaccatgtgatgcataaaagtgctcggacggttttaaccgcggacttaccagttgtgaagactgacgcagcagaaattgaaggctacctgaaaaaggggcacgcacaattagccgccgagcatgttgccaagttgccacacgcttttaaaatcaacgcaattggtgaatcagaaatgatgacgaccggtttaaaggcaattgaagaagcgaccagcactgaagctgccgtattgaatactggcttgttcttgcaagatttgcaggctgggattgttactaaagatgatttgcaaactcaattaccgcatccaatgcatctgattaaagtgacgctcaaagggtatgatttgtggcggatggtgcttgaaatggagaaaaaccggctctttttacgcaagtttcctattaaagggatgagtttccgtggtaaaatctttggagacatcgtttatgacgggatagcggttgatatgaaattgcggcgcgtcttttggcatgggcaagaaattgatccagaagccagctatacgttgacgaccgtcgatcattatctattcattccattctttccaacaattgagattgttggcgagaccgagatcgtgttccctgattttctcagagacgcggtcgctaaatatttaagtaaacattatcccttataagggaagaggaggttcgctgtggcggatacgaaaaacagtcccaagattgccaagaaagtgaccaaggcgattgaaaaagaaatgatcgcttcagccaaacaaccggaagtgccacaacacgttgtcatgaagactgaaaccacgcttgagattgataaatgtgcttatgaagtcgttgtgaactatcgtgaaggcttcgacgctgaaaagttgaacgaacgctataatgaagtgttggctaagtacgattatattgtggctgactggggctttgaacaactgcgtttgaagggcttttacaaagcaaccaacaaacgcgctaataaagatcaattaatcaatacgttacaagattatctatacgaatactgcaactttggttgtgcctactttgttttggaacgtcaaggcaagccaatcattaagaatgagaatcggcggagtaatcgccaacgtggtcagcaacggcgtcggcgtcaaaagccaggttttacagaacggaaagtcaccgataacaagcaaaaagtgactaaagaacgccctcaaaaggcggtaaccgagaatcaaaaatcagttaataagcgtcattttaagatccgtcctttggaacacaataaaaagtaaaacgtaattggagttagacaactatgacaaacacagattatgcagggtatttaattgatttagacggcaccgtgtatcgcggccgtgatcggatgccagaagccaaagatttcattgaacgcctacaagcaaaacaaattccgttcatgtttttgacgaacaacactacgaaatcaccagctgctgtgattcagaatttggcggataaccatgacattcatgcgacagttgaccaagtgtataccccttctttggcaacggcgcgctatctattgaatttaaacggtggtacagcgaatggcaaaacggtctacgtgattggagaactcggtttgaagcaggctctatcagatgccggttttaggaccaatgaattcgatccagactacgtggtagttggtttggattatgatgtgacttatcacaagtttgaattagcaacgttagcgattaagcgcggtgcattattcatcggcaccaatgcggatacgaatttaccaaacgaacgcgggctagtgccaggtgctggttcagtgattgcgatggttgaacgggcaacgcaacaaagtgcactctatatcggtaagcctgaaaaaatcattatggaaatggccttagagcaattcggcttgacgaaggaacaagtggtgatggttggcgataactacaatacagatatcaaggctggcttgaatgcagggatggatacgttgttagtttacactggtgtttcaacgccagaggatgtggcaaaagaagccttgcaaccaacgcatatcattaacgacttaaccgaatgggacgtttaaagcgggttagaagtaccactagttgggcggcgttgtatttggcgttagtcagcagtgcgattttaataacgttattgttaagctgggcactttatccgctagtgagtcactacctcgatctagcgagtcaacgggaattaacgcaaccgcggctgatgatgaactttaaccggttaatgggctacttacttgtgccatggcaaccacgcttacaactacctgactttccaatgtcattggatggtcggcaacattttgttgaagtgaaacgcttgtttggtttagcagtagttatttggctagtaacgattggagcggcgattcagcattggcggagtcggcgcaagaccaatcgggtttggcaatacgtccgcccaatgcaagttgctcttgtggtgccacccatattagggtttattgctagtatgaatttcgatcggtttttcattacgttccacgaattattgtttcgcaatctgaactggcagtttgatccaatcactgatccgattatcttagtgttaccggaagtctattttggcctttgttttacactcttcttcattttgttagagggtagttttgcttggctgttatggcgcggtaaacgtgcgctataacgtttggctttttattaagaaaatgcaaaagtgattgctttgatgcatggattcggtatcctaataagggatatatttttaaattgaaaaagagtataggagaaatcgcatgacgcagttaattgattttgttttacatattgattcccacctggtcaacattgttaatcagttcggcaactggacctatgtcatcttgtttgccattatctttgttgaaaccggggcggttatcttaccgtttctaccgggggactcgcttttgtttgccgctgctgctttggcagcccggactgataatgacttgaatgtctggctgtttgctgccttgttcttaatcgcctcaattgcgggtgattcattgaatgaacaaattggccaacgggtcggtttagccgccacgaagaatcggttcttcggcaagtttatcaataccgagaaaattgaagaggcgcaggtcttctttgataagtatggtggtaaaaccattgcaattggccgtttcatgccgattattagaacattcgttccatttgttgccggtgggagccagatggccttcatgaagttcttccgttacgacgtgattgggagtatcttgtgggtgacactctgttgcggagctggttacttcttcggaaacattgctgttgtgcgtgaacatttctcactcgttgtgttagggattatcggggtctcattgattccgatggttatcacagcggttaagagtcaaatgaaaaaaaataatgcttaataaaatactaaaaagtcctgcatcaacggttaaaacgttgatgcagggcttttttaaaacgtgctttagctagcaacttcttccgtttagccacggtttgcaaacggtcggctgtgcggctcattcactaaccgatgctatactcagaagctaaccgctagttaaagcactcttatcgaaacgtgctccataagccaccttcttccggttagctacggccagtaaatcatcgactgcgtcgctaatttactggactaggctaatcctcagaaggtaatcgggcatattgcgcactcttacataatggacgtgctgtgtagtggttggcgtttttctgggtagagattcgttagtaactcagtcacagccattggtgcttcaccaaatccgctggcaattaacttcactttaccagggtaggtagcaatatcgccgatcgcatagatgttcgggatgttcgtctcgagttgttggttaacagcgacttgatggtggtccaatgttaatccccaatcacggagaattcgagtatcagagataaacccatagttaacaaggagtttgtcaattgttagctgctcttgatcggttgatttcatcttgtttaaagttaatgcgagttgttggttcatttcggtcaaactatcgattaaaaacggcgtcttaatttggacagttgattgtttgagtgcttcaacgctactttcaagcccgcggaattgatcccgacggtgaattaaatagacttgtttagccactttttcgagcattagtgcccattcaatggccgaatcaccaccgccagcaacggcaacggtttgatctttgaactgcgccatttcttttgcgaagtagtgaatatagtgattttcccattctggatcgtaatcgacagcgagttttcgcggtgtgaaagccccgttcccaacggcaatgatgatgcctttggtgcgtgtcgtgcccttcgttgttttaagaacgaaagtcccatcttcttggggttcgataccttgcacagcagtggataattgcaaggttggttggaaaagtgccagctgttcaattaagttttcggtgagctgtgcaccagagataccactgaaaccagcgacatcatagatttgcttttctggatagagtgttgcgacttgaccaccgagttcggggagactttcgataatctgaacatcggccttgcgcataccagcataataggcagcaaacattccgacaggaccgccgccaataatggtgatatcaaagagatgatttgaatcaagcatgagataacttccttaatagtagatttcttaaattagtatactagaaaaaaataaggaaagcatgtttaatgaaataatcgtagtaatttatgaagcaattcgctatcataatgattgtgagtcaaaacaaggaggacgattaaatgacatatccacaattagaccttgcaaactttgcagggccaacagctacttttgacacaaaccgtggcgaatttacagtagcacttttccaagaccaagcacctaagacagtagaaaactttatcggcttagctgaaaaagattactatgacggtgtgattttccaccgggtcatcaacgatttcatgattcaaggtggcgatccaaccggtactgggatgggtggcgaaagtctctggggccaacctttcgaagatgaattcaaccaagaagtctttaacttaaatggtgcattatcaatggctaatgctggtcctaatacaaacggcagccaattcttcatcgtaacaaacgaacatatcaaccaaaacatgttgtcacaaatgccaggtgctggttacccagaagaagtcattacggcttatgaaaagggtggtacaccttggttagattttaaacatactgtatttggtcacgtcttgagtgggatggacgttgttaataagatcaacgctacagaaacaggaatgcaagacaaaccagttgaagaagttatcatcaatcacattacgattaatctttaattttaattgaagaggtgttttagatgctagtaggtggaattgaaggagggggcacgaagtttgtctgtgccgtaacagatggaaaaaatgggatacaagaacgaattagtatgccaaccgagacgccggaacaaacgatgccacggttatttgaatattttgatcaattcgatcatttagatgccattggtttggcatcgtttggcccaattgatgttaacccgaaatcaaaaacatatggctcaatcatcgatacacccaaagcagggtgggaacactatgatatcttaggagcaatgaaagctcattatcctgatacccagtttgcttttacaacggatgtgaatgccgcagcctatggtgaattgaagatgggcgctgctgatggacttgatagttgtgtttacttaactgtcgggacggggattggtggcggtgttgttgaacacggtcagattttacaaggttacagccatcctgaaatcggccacatgttaattcggcaacaaccagaagattcatacgaagggacatgtccttatcaccacaattgtttggaaggcttagcagctggtccagcaatcgaacgccgttggggcaagaaaggccacttattgccggctgatcatcaagcatggcaaatggaagctgactatttagctcaagcttgtgtaaatattgctttaatgctatcgccagaacgaattgtcttcggtggtggggtgtcgaaacaagcccaactattcccaatgattcgtgaatcctttaaacgtcaaatggcaggttatgtgcaaacgcctgaccttgatgactacatcgtgcatgttgcattaggggatgacgctgggattactggggcacttttactagcagctgatcaactttagttaaatgagaacctgagggatgtttcctcaggttctttttacatattatagaaggaattgtataaaaggtcttagccgatagcttgccttttactaactggaaggcttaaaatagataggaatattgaaatggaggaaaatatgggttatcgaattggacaaaagattacaggtactgtaacaggcattcaaccatatggtgtatttgtttcattagatgcaacggtccaaggcttaatccacatctcagaatgtggtcatggttttgttaaagcgttagatgaacagtttaaagtcggtcaagtgttagatgtattagtgttagatatcgatgaatacacacataagattagtttgtcgttacgtgcgctacataaagcacaagatttagcaccacagcgtgctaagaaacactattggacaaatcgccggattcatattgggtttgcgcccattgcagaacgattaccaagatggactgaagaagcgatagaagacttgaataagggtgagaatgtatgagtgctaaagtagccggaacgattatgtataagacagagcaaggacaatatgattttttggtccaaccacaagttgatgcttcttataagatgctggtgaccaataagcaagatgatcaaacaccacttgctgctgtattaattgcaatccaagcacagctaaatattgatgttaacgaattgagattgatcaatttagcgaatattaaccttgaaggtgagaacgtttcgttctttgtctttcagtggggagctcatgagactgatttttataccgaacaattgagaataattagtgaagccggttttcgatttgcgaaccctagtgagttcacgaaattactggataagttagaagtcacgagtgttccgcacttgaattagttcggacaatcggtgaatatctattcaacaatgtacgcttttgaaactttttatatttttattcaaaaaaaagtaaacaatcgcttgacgatgtcttggattgttggtatagtattctatgttgtcagcgagagaaaagctcattgctaacgaaataacgggtcaaacgagattgaataaatattcaaaaaatatttatatttataaaaataaactaggtcataactcatgagttgtgaccccttcgcatcaaaggttcttattggcgttttcagaaaattcgtaagtttatctacaaattaaaataatccgaaaaacatcgctcaaacattggttttaaaaggtttttaatgaacgattgacaattatcgtcgcgtgaaatatacttgcacataaccaaacaatgatataaactaaccttaactgctgcttaatcaagttgaaatgagtcgctagtttgttttaaataaatgattgtcggcttttgactagccggtggtcatttattgtacataagttaaaactatattgaatgaacggtggagggttgcagatgccagataataaaagaatattaacaattagtgagtggtatctggagtgtcagaacatcacgactcaattgaataaaatgagcgaaaaacatggcttaagttatgatcaatttctcgtgttggaacagattgtggaactaggacggaacaccccaggccaaattgcagtcgtatttgggacctccgcaccagcggcttcccgtaaaatcaatacgctacaaagtaaaaagtttattcgcaaaattcgtgatatggaaaatgaccaacggaatgtttggttagaagcaactgaagaaggcctccgcaagtacaaagcgctaaaaaaagatattactaagcatactggcatcaaagcaacggacttggagcacttacggcagataaatcaaacaattatagaataaaaaagggaaagcccatcatctttagatgatgggcttttttaataccaataaggtaaatcgtaatcattttatgcataaattggtataattgtgaaagaatataaaaagttgaacttaaggggtggagaaatggcaacattaatggacgtcgctaagcgggcaaacgtttctaagatgacagtttcgcgggtgattaatcatccggaacaagtaacagatgaattgaaggaattggtgtatgccgcaatgaaggaattggattaccgtcccaatttaattgccaaagccctagtcagcaacagtacccgaatcatcaaattgtgtatcttggaagacatcgacgttaccgaaccatattacatgaatctaatggtcggaattgctaaggcacttgacctacatcagtattcgctgcagttagtaacttggcgtaactttgatatcgggaattgtgatggctacattattacgggattgcgtgaaagtgatgttgcatggattcgcgatctgacaaagccagtcgtcgtttttggggagaatcagtacggttttgattatgtggatacaaataaccagttggggacctaccttgcagcgcaattagcattagagcgtggttatcgccagcttatttatattggaatggcgagtgaagaagcgtttgaaaaatcacgtgaagccggttatttacaattaatgcatgagcagcagcgtcctgttcagttacaccattttaacaaccatagtcatttgaccgaagcctacatcattgaacactgggcgcaattcaaactcgagactgcgtttatttgtgccacggatcgtctggcaattgggattgaacgggggattgcgtcgtgtggtggtcatgtgccgcaagagtttgggattacaggatttgatggggtctttttaaatcaagttgcctctcctaagttgacaacgattaagcagtccatcattgaaatgggccgtgcatgcggagagaatatcctcaagaaaattaatcaggagtggattgagcgaccattgatattcgaaccaaacattgaaatgggcgggacaattcgccccgtgctaaaagaacaatcggaataagcataagaaaactgttaccggtaacatcaggaaaacatttgcaaaagcgctttcaaagtacgacaataaaacttgtaaacagcactgataaaaatttattggaggtcgttatagtgaaaaagatgtggaaaaagctagggttagtttcgttattggctggtgtaacgttaacattggctgcttgtgggagcaagagtgcggatggcggcaatgtgaaaatcacaattctacaaggaaaagtggaatccaacaagcaattcaaagcgattgcgaagaagtatgaaaaagcacatccaaacgtcaagattgaaatcacatcaatcggtggtgggacacagtataatcccgttttgaagacgagaatttcatccgggaatgcacctactatttttagtttagatgggccagcatcggttaaacaattcaagaactacacggctgatttaacggatacaaaagctgctaaggccgctattccaagcacactagatactgttaagtcacaagggaaagtttacggcttgccatttaacattgaaggctatggttttgtttataataaagctgtcttcgaaaaagccggtatcgatccaaagagcttaacgacttacgataaattagaagcagctgttaaaacattaaatgaacaaaaagaacaattaggcattaaaggagtctttgctttacctggtaaggaatcatgggttctttcagatcatttgttgaatgtttatctaagtaaagaatttgatggcaattcacaaaagttgtatacctcaaagaaaatgaagtttgaaaacaatgcagaaatgaaacaaatgattgatttgcaaaaagaatattccgttcaaccagtcatgcaaatggattacgcgggacaagtgaaccaaaactttgctcaaggaaaagttgcgatgattcaacaaggcgactggatttacgaaaccgttaaccaaattgatgcgaaattcgctcaagacgggatcggcatgattccaatgccagttaaggaacaacaaggtaagatgcctgttgggacctcaatctactgggcagttaataaacggaagagtaccgacgaacaaaaagcagctaaggacttcttgaactggctatatacgtctaaagaaggtaaaaaagacgttgttgagaaattacatttcgtacctgcttataaaggttacggtgatgtgaagatgccagatgcactcacacaatcggtctatgattacagtcaaaagaaagcaacattcggctgggttttcccgggttatactggcacatcatgggatccagacgttgcccaacctaacctacaaaaatatctatcaggtgaccaagattggcaaaagactgtttcaaatatgaaggacggttggacaaaacaacaaactaaataaatttattcaattggataaaacaaaaagagggtattgaaatgaaaaataagagtttatcattttggttatttttaacccctacccttgttgcattagcattagtcgttttcattccaatgctggagggcctattctattcattcactgactgggatggactctcttttactaaggtcgttgggtttaaaaactacatggccttattacaagataaagcattcggaaacgccttttggttcacggtagcttttgttatcgtgaccgtcatcttgctaaatgtaattggcttggggttagcattacttgtgacacagaaatttaaaggcaacaatttcttacgagcgatcttctttatgccaaacatgattggtgggttaatcttaggatttatctggcaattcattttcacgcaaggctttagcgctttgggatctgccttacacatgactgccttccaaaactggttaacgaattcactaaccggtttttggggcttggtaattgtgacggtttggcaaatgagtggttacatcatgattatctatattgcttacttgcaaaatattccaagtgaagtgattgaagctgctgaaattgatggtgcatctgcttggcaacgatttacgcggattacattcccaatgatcgcgccagcatttaccgtctgtatgtttttaactctgtcgaatgggtttaaaatctacgatcaaaacttgtcgttgaccaacgggggaccttacaactcgacccaaatgttggcgatggatattgtgaatacagcctataattcgagtgatttcgcactcgctgaagctaaagcaatggtcttcttcttgattgtcgctgcgatttctttagtacaagtcttttataaccgtaaacgggagggcgatttctaatgaataagaaaagaaatagttggatcggcgtcctcggtgtattgattggtcttttatggttattcccattctatatgattctaacgaactcatttaaaacaccaaaaggcatttttgcctcagtattgtcgctgcctaatccattcacgaatgtgaactatggagattcgtttaaagcattgaatttcattagttcattgaccaattcgctcattattacagtctgcagtgtgttgctgattatcctctgttcttcaatggcagcctatgcactgcaacggaataaatcgaagttgagtagtagtttattgctgcttttcatctcagcgatgttgattccattccaatcagttatgattccgttgacggcaaacttcggtaatgtgcatctgttgaatatgtacggcttgatgttcatgtatttaggcttcaactgtagtttatcgattttcctatatcaaggcaccctttcaagtattccgattgcaatggatgaggcggctgaaatggaaggtgccagtcggtggcaaatttattacaagatcatcttaccaatgttgagtccaatgactgtgacggtcgctattttgaacatcattgcgatctggaacgattatcttttaccatcattggtcttaccacaagcgcaatatacgattccactacaaatgtttaatttcttcggagaatacacgaaacaatggcacctcgcattagccggcattaccttgtcgattattccggtcattgtcttctacttattcgctcaaaaatggattatcaaaggtgttacagatggcgccgttaaataattaaggaagtgttaatcgtgaaaaagcacagcgaaacaagacaaacgttattggcagccgggaattggttatggtcgctttttaccatcaaccttgcttggtttggaattaattttcctgtcattctgacactgattttaatgtttagtatgccaaacggccgagtaatgattccgggtgcagttgtgctagtgttaatgctcagtttgtttacactaccaagtttagtcgcggtttttagagcggtggaccaatggcaagttaacggtgatggtaattatgcacgcgttgtgttaaaagggtggcggcaggcactgccagactttttagtgaatctgacgttagcgacggcattgatgatcatcgtgttgttactaaaagccagtgtaggcgatattttagttcgtagcggcttattggtctggtttggggcgttattgctagttgtcgttgccagaagctacttggtcgggttagcgcgccatgatgttaccttaggcggctttatcattgccaatgggggcaaattagtgctagccaccggcgttttcatcttgttgatgggcattaatgtctttttaaaactcgcgtttatgattcttgttgcgagcgtttcgttggcagccttcattagctatcaattattgaacggtgcaccagttaaaaacgaagtaagggagaaatgatcgatggtcgaaattaatttaaatcatatcaataaaaaatattcaggaaatgataccaattctgtcacagatttcaatttgaaaattgcagacggtgaattcatcgtatttgttggaccatcaggctgtggtaaatcgacaactttacgaatgattgcaggtttagaagatatctctgatggggaatttaaaatgggcgaccgagtgatgaacaaggttgcacctaaggatcgagatatctcgatggttttccaaaactatgcgctctatccccatatgacagtcttcgataacatggcgtttggccttaatattcgtaagaatgataagcaagataccaaaaaacgggttgatgccgcagcagaaatcttaggtttatcggagtatttagatcggaagccatcttctctttctggtgggcaacggcaacgagtagctttaggacgagcaattgttcgtgatgctaagttgttcttattggatgaaccattatcgaacttggatgccaagttacgggtgcaaatgcggactgaaattgcgcaattacatcaacgtttaggtcgtaatttcatctatgtgacgcatgatcaagttgaagcgatgacgatggctgatcggattgtcatcatgaacgatggtaaaatccagcaagtcggcaagccaactgaactctataatcatccggttaataagtttgtggcaggctttatcggttcaccagcaacgaatttcttcacggtaaccttaactaatgggcatctagtgaatgacgatggtctaaatatcgcagtgccagaaggtcagttgaaacagcttattgccggtggttacgatggtcaacaagtgatcttggggattcggccggaagatattcacgctgaagaaattgccctccaaacattcccagatgctaaaataacggcagaggttgtcgtttccgagttattaggggctaacacaatgctctactcaaagattggacaaaccgattttatcgctgaagttaattcgcgggattatcatgaacctggtgatcgggttgagatggcgcttgaaatgtctaaagcgcactacttcgacatcgcaacggaagaaacaatctattaagcgctgctaaataggcggaataattttggctgacgtatcggagggaacgaaatggagagaatttttgaagtcgatccgtggcagattgtcacgcatcaactagatcgtaaacataaacggctacaagagagtatgacgagtatcggtaatggttacatggggatgcgcggcgtattcgaagaggattattcaggagacagcctgcctggcatttatctcggtggtgtctggtatccggataaaaccgtcgttggctggtggaaaaatggttatcctgactattttgggaaagtgatcaatgccatcaatttcatcaaaacgaatcttaaaattgatggtcaagcggtggatttaggcaaagatgaagtgaccgcatttaaattggcactcgacatgcataatggggtgttaacccgccaattcatcgttactaaaaataataaacaagtgcaagttacgatagagcggtttgttagtatcgttcaaaaggaattatgcgcattgcgctacactgttgaaaacttggcgagcgaagcagttgagattgagattagttctatgatcgatgctgatgttcaaaatgaggatgcgaattacggtgagcaattctggcaagtgattgagcagtcagacgctgcggatgacacttatttggtcggaaaaacaatgcccaacgatttcggggtaccacggtttagtgtgggggttcaaattgatcatcaaacgacaatgatggcagatactgggcttcaagaagcccaccaagttgggcaacgttttaaacagcaattggcccctaaaacgcaattgaattttgaaaaacgagcggtagtggtgacttctcgagattattcagagttggacttggtaccaaatatgcaacgtatcaagcaggtcgttgcgcaacaaagttaccagcaattattagcggcacagacgaatcaatgggcgaaacggtggcagatggcggacgtggtgattgtcggtgatgatagtgcccaacaggggattcgctttaatttatttcaacttttttcaaccttttatggtgaagatgagcgtctaaatatcggtcctaaaggattcactggcgaaaaatacggtggtgcaacttactgggacacggaaggttttgcaatgccgctttatctctcattggctgatccgaaagtgtcgttgaatctattgaagtatcggcataatcaattgtcgggtgcagaacacaatgcccggcaacaggggttaaaaggcgcgctctatccaatggtgacctttaatgggattgagaaccataatgaatgggaaattacatttgaagaaatccatcgcaatggcacaatcgcctatgcaatttataactacacacgttacaccggcgatgagacttatttgctcaatgaaggtatcgaagtgttaactgagattgcacgcttttgggcagaccgtgtccatttctcacaacgtgcgcagcggtatatgatccacggtgtgacagggcctaatgaatatgaaaacaatattaacaataactggtatacgaatttattggcgcaatggacgcttagttatacgattgaaacgctcaaaaaagtaagcgataccaaaaaagcggatctgagactttcagatgaagaactctcacaatggcaagcgattattgaaaaaatgtacctgccacaagatgaacaactcgggatctttcttcaacaagatggctttttagataaagatatccagcctgtcagtgcaatcccagcagatcaacggcccatcaaccaacattggtcatgggataagattttgcgttcgccgtacattaaacaagccgatgttctacaaggcatttggtattttatggatcgtttttcagctgctgaaaagaagcgtaattttgatttctatgaaacgttgacggttcatgaatcaagtttatcagcggcggtccatgcgattctagcggctgatctgcattacgaagataaagcggtggaaatgtacgcgcggacggcacgcctggatctcgataattacaataatgataccgatgacggattgcacattacgtcgatgacggggagttggttagcgattgtgcaaggttttgcaggcatgcgaattagcgatgaaggacaattatcattcaaaccatttctacccaaaaaatggacggcttatgaattccatattaacttccgcggccggttgttgaaaattagcgtgacggccgaccgaactgatatcaaactactcaagggcgatcgtttggcaattcaagtcaatgatgcgtcgatgatgttggaataggaggttattatggacggtgtcttattcgatttagatggggttattacggatacagcccgatttcattttgcggcgtggcgtcaattggcgcaacaagcgtttggcgtcagcttaccagatagctttgaagctgagttaaaagggattagtcgggaagcatccttgcaacgaattgtggcctttgcccaacttgatggccagtatacggtggcacaactcgcagcactggcgactcaaaaaaatgaaaattacgtggctgctatcaagcaattaacggctgccgatattttaccgggtattcaaccgttgttagtagcattaaaagcgcgcggggtgccaatggtcattgcttctgctagcaaaaatgcgccactcattcttgatcgattagctttatcagcatattttacagcgattgttaatccgaatgacgtgcaccaaggtaaaccagccccggatatcttcatcgcagctgctcagaagattgctgttaatccgcgaaaatgcgttggattagaagattcagtagctggtgtggccgccattaatgctgcaggcgctgtttcggttgcgattggtcatgcgagcgaattatcagcagcggcggttgttgtccctacaacggcggcgttaacggctgatttgttagaacaagcctttgaacagtatcaacactaattaatcagtgcaaccgagccttcgggtgtgtgttggactggtttttttaaggaggagacaaatggatttagcagcgatttatcatcgaccagatagtgagtttgctttcttatatcagccagataggctacgggtacgattgcggacggcaagtaatgacgttgaagcagtgtacctagtgtatggggatccttatatattagtcgatggcagttggcaaccgaaaacgattcggatgcagcaaggcttaataacggatctcgcttgtttttggacgattgaactgaccattgatcgccgccgattagcctatgcttttcaagtgattggtgtggacgggaccagcactttttatggtgatcaggggcctggtccaatcttacctaaaacagatgcttgttttcggatgccctatttccaagaaattgatcgggctaaggtaccagagtgggtcaaacaaacggtttggtatcaggtttttcctgaacgatttgcaaatggtgatccgacaaatgatccagatggaacattaccgtggacaaatgaggcaccacaggctcaagatttctatggcggtgatttacaaggggttattgaccatttagatcatttggtggcgttagggattaatggattgtatctcaatccaattttcatggcgccttcaaatcataaatatgatacgcgtgattatcggatggttgatccacattttggcaatgacgagacgctacggcagctgattactgcttgtcatcaaagagggattaaggtcatgctagatgctgtcttcaaccatctcggcgatcaatcaccacaatggcaagatgtgattcaaaatggcgcggcttcaaggtatgctgattggttccatattcgggattttccagtgcgttatcagccaggtcggaatttcgaagatgctacagacattacatatgatgtctttgccacgacgccacacatgccaaaattaaatacggctaatccagaggtgcaagcttatttgttatcgatagcgcggtattggatcgaagcatttgatattgatgcttggcggttagatgtcgccaatgaagttgatcatcacttttggaaaaagttccgacaggtgtgtgatgctgctaaacctgatttctatattcttggtgaaatttggcattcagcgcagagttggctcagcggtgacgagtttagtgcagtcatgaattacgcctacactgatgcgattttggattattttattcataaaaaaattccgctccaccaaatggtttcgaagctgaatcgacagttaatgctgtaccgggatcaaattaatcaggtgcagtttaatatcctagattcgcacgatacgccgcggttgctaacgatggccaatgacaatcgacgcttgatgcgtcaaacgatggcttttatgtatctacagccgggtgtgccatgcctctattatggagatgagtatggcatgacgggagtggacgatcctgctaatcgtaaatgcatggtgtgggatcccgtggaccaagatcaagccatgtatcagttcgttaagcagctaattgggcttcgccatggtaagcaaaaactattgtcggaaggacagcttgagtggttaattgagccgactcatcccgacgtcttaaaaatgactcggcgattaggtgagcaacaattgacggctgtttttaatgcaggtcaaacagccgttagtgttgcatcaatgaggacaccaattctgtctgaaggggttcagcagcaaacagcagcgaccatcattgaaccagatggctttatgatttattaacatttccaaggcaataaaaaaagattcgctccatatgggcgaatcttttttagttaggctgctcgttttctttggaattttgcaaccagtggtaaaatcacgccgaggcccattaaggcgactgagacgacgatgtttaagattaattcatgtgtatatttggctgtgccaggtgtggcatcttgtgggaagatactgaagatcgttcctaatgctgtaatggctaaacaccagaagccaacgatgatggcccatggtttgtttttaatgtatgtgtattctgatgggaatttttcactattgaaacggacccgtaagaaggcgacaaagatgaaacaagttacaaatggtgagacgataccgttaatatttaacaaccaattgaagatgtcgttaatctcgggcagaaaggcactagatgctaaaacaaaggcacaaatcccagtggtcaaccagtaaccgttgattggaaggccttgtttattggtcttagtcagtgcttttggtaagaattgtttggcagtgtcggataagaaaatccgtgtgccgccatcgagtagcatcgctaattgagcgcccatgtaaatcgcttgggtaacagcgaagatgtagagtaagactttacccatgtggaattgttgcccaagggctaagaaggcgtagtatgaaccgttcatcttcaagtcagctggtaagtggttggcatcgaagaagacgccgattgctaatgagccgaagatggttaggaaggcggtcattagagcgagggccatcatggcttttggaaaatcttttttaccatctttcatttggccaacgtatggtgcaacaagttcggcaccgttcatggcgaaaattaagaggccgatggttgagaagtaatgtaaatcaaattttggaatgaaggtgtgtgcgtttaatggatgggtggcaacgtgaccaccgttcaataaaccaacaaaggtcattaggacaaagaggatggtcatgacaaacatcgcccccccaccaacgatactgagtacctgtagagacgatgtaaacttgtgttggaagaagatgaagaggatggtaattgcggctgttaaaagcgcaaaggaagcccgtgagagcttgtcttcaagatttccgttcccagtaataatccaaaagaaggaaacgaccattgaattagcaacatcgaccaagtatggcaaactcgctacccagtaacaccaagcggttaagtaaccccaaacatcaccgcttgtatggcgcatccaactggaaagaccgccaccgtctttactgaaagcagagcctaagtgaccaaccattaattcataagggaggacataggcgaatagtaagacaatccatgagaagacaactgccatcccttggttttgaaagttataaataatatcgtcaaatccaatgacggtcacaaaatccattaaagcaaggacttgccaggtaatatatttcttttttggttctatttcatccatcgtaaagaaaccccttttctgaaaattcacaatgtttttattataatcaaatcagaaagggaagacaaaacttttttgactgtttcacattgatttttaaagaacgggggaataatcttacaaaattgttattttagcccgttaaaatgtcatctaaaaagcgcgcatgccgttttaatctcttgtaagatagaattatcataaaatctggaggcattattaatggacacaccaacagtcgttagcgtcaaagacgttaaaaaaacatacggtaaaccaaacgaaaaacaatacacagccttaaaaggcgttacttttgatgtgaaacagggcgaatttgtcgggatcatgggggcttctggttcagggaaaaccaccttattgaacattttatcaacccttgacaaaccgactgctggccaagttgaaattaacgggcaagcaattaatgggttgaaagggaatgaattagctgattttcgtgccaaggaaattgggttcatgttccaagacttcaacttattagaaaacttaacggcctatgaaaatatggcattaccattgacgttacaaaatgttggcggtaaaaaagtccgcgatttagtcacatcaatcgccaagacgttatcaatcgatagtttattaaacaaatatccaaccgaattatcaggtggtcaaaaacaacgggtcgccgctgcgcgggctttagtccacaatccagctattttattcggagacgaaccaacgggtgcacttgattcaaagagtgccaaggaattattggatacaatggctcagctgaacgaagaacaacgcgtttcaatcttattggtaacgcatgatccattttcagctagttattgtcaacgaatcttgtttattaaagatggtcaaatcggccaagaactcgttcacggcgataagagtcgggaagccttttatcaagaaattttagatacattaggcacatttaaccattaggaggaagtctaaatatgttattgaagttatcattaaccggcattaaaggccgtttgaaagactatttagtgcttttttccggtctaattatggcaagtgccattttttacatgttcgaagcactggcaactaacaaaagtttcgttacgagtaactcgccaattagcatggcgggcattattttccaaatcgggtctgttttattagggattatcacattagtctacattatttatgcgaataatttcttaatgagcatgcggcgtcgagattacgggatgtttatgatgctcggcgcaaaaggccgcaaaattgcccaactaattgctgctgaaacattagtgattgggacagctgctactctcattggaacggcgctcggggtcggattaacccaaattgttagcaatctgttattgtctcaaatggatattcagattaagcatttttcaccattttacttacctgcagtgttagtaactttgattttcttcattatcttgttcattattgcagcggtagttaatcaattccaacttttgaaaacaccagttttacaactcttacacgatgatcaacaaccaaatcgcgtttcacaaaataaattaagccgtattgtgcaaattgtcttgggcttacttttcttagctgttggttactatatgatgattaaagtcgcaacgttccaaattatgggcttagttgtggcattagtgacaattgtgctcgggacgtacttcttgtttaatgcccttttcggctggttgattacgttgctcaaacgtaacagcaagattcgtaatcgtggtttaaataattttacgttagcgcaattgagcttccgcattaaggattacaccaagatgctcgcattggtggcgatgttatttgcattggcactaggcgcaatcacagttgggattggctatcaaagtgaaattccagaaatggcagaaacaatggcgccttacgacgttgttttaaatcaaccgaaccaagaagcattgcgcctcacaaaagatttaaagggtgtgaaggcgactgctaattacgatgttaaagaagatgcgaaaactgtctactatcggacagcacaacttgaaaagtcaccaatcatggccattcagtttggtaatgggaatggtgtcgcccgcgcaaaaggggttaaaccggtgaaactcagtgagattcaaaacggcgattcttcatccttgcgcgcaattcaagtgccaagtcaatctagtaaggacgttaaagtcgtctctgacgctgaatttaatcaagtggcaggcgcaaccacgcaagttaaaacatatcgggtcaaagactttgcggttaatttacccgttatcaaaaaaattcacgcacaacaagtgattgcaaatcctgaattggctaaaggtcaaggggctacaatggatagtagcaagtatgctaactataagctagcgaacagcatgttcagtgggctcgaatttatgggcttcttcctcgggattgcattcttagcgatgttagcaagttgcttgatgttcaagattttatctggggcagctagtgatgttaaacgctacacaatgttggctaaaatcgggacgcgtcacaatctattgcaacaatccattgccaaagaaattggggtcttattcctcttaccaggtatcgtcggcgtcatccatgtcctctttggtcttcaattgttcaaattgattatgattgatccatataatgatctctggattccattttcaattttcattattctctacgcaatctactacttgctcactacatggctctacaaaggaattgtgttgaaggaagttaaatagtagatggttgaaacagtttaaaacataggaatcagtctaaaaaagccccctttaatctgaacttcgagattaaagggggctttttttagatgaggtcgaagttgtttctctagacgctacttgttacactgatgtcattaagaggcgtataccacgctggattagtttttaacttgcttagctacaattgtggtgagcattttacctacaaaaaaagccaaagaagactgccgaaactgtcatttgaagcgcgtattattattgaacggcatgaattattacctacaaaaaaagctgaacaatcagaataatattgcccagctctatattcaatgaatattcatacatcaattatcgttttgatactattgaagggttaattgattgtaactttcaacagtaacgccttcgtctgttaaaataactttagtaatactaccgttcattggactaacggtaacatcgaattggtcgttaccaaacttgccaacaatactgcgaatggttgtgccatgactgaccatcaagactttatcaccgtcagaacattcagcacgaagttgtttgaaacctttaccgacgcgggcccaatattcagcggcatcttcagcatcgtggaagggatcagcttctttcatgaaatctttagaggcatcgagtgagtatttggtgatgatttcttggaaggttttggcatcatgactggcacctgccatggaccacgctttgggtgaatcttcaccttcaaaatagccgtagaattcttcgcggaagtgcggtgtgatagcatatggagtatcaaggtagaaattcttatggagaataattttagcggtgtccattgcgcgactgcggtcactagaataagcttgagcaaaattaactttcgctaattctttgccagcgcgttcggcatctgcaatccctttcggagtaagtggtgagtctgaccaaccttgcatccggttataacggttaaagaatgtttgaccgtgacgcactaaataaagtgtgattcgtttcatatcgtaaccctccaacaatagcttttagtaccttcattctagcatagataaaaatggtgtgcagggtcattccatattttttgcaaaacggttacatacatttatagtttttaatggtaataataacaattgatttataatcaattgcaattatcattaatagagaataaattttaaaagatactaataaataactttatcaatatttattaatattttaagcataaaccttttgattttatacattttgtgttatttttgactagtaacacttaataaccacatttagtgtttatgtaaaggagtggttcgatgcaaccagaaacggatagtaaccttgttgatcgattcaacgaatggtatctgcaaattggccaaatttacaataagataaatcatttaactgtcacgcacgacttgacatacgatcaatttttgattctcagagaggtcaaattaaaccccaatattgaagtggcgaaattatcggaatcctttgatctttcaggcccagcaatttcacgtaaaattaatgttttattcagaaaacacttaattgttaaaaatcgcagtgatgaaatggaccaacgtaaagtattcatttcattgaatgagcaaggattacgaatggttgatcaattggaagtcgatttctacttattctttaaacattttaaagatgacggcaatgcagacctttctcaattattcgcacaaacaaaccacttattcgatacaatggataaatgggaacctaattcagatattattgattaggtcaaaaaaagccgcgcacaaatttaaatttgtgcgcggctttttttatttaatcgttaaagttgccattttctacgtctttgatgaaagtcttcaagtgatcgaagtaaacgggtgcgttatcaatcatgtgatggtgaccaccatttggcgttgtcactaagcgagcatggggaatcttttcagccatgatcttagcggttgcgattggcatggtttcgtgttcaccaaatgtgattaacgttgggacagtaatcttgtggagttggtcacggaaatgccaatcctttaatttcccagtcacaacgaattcattatcaccttggaagacgccataaacgtcggttgccattgttgggattaaatgtgagattgcaagtggttgtttgcgatcaacgtaaccagcgtttaacttgtcaacaagtgcttggtattcatcgttgtcgtaatcattcttagcttcacagtcttgcatgaatttcaattgttcaggggtcatgatgtcttcacgaattttgttgatgtttgtgacatattcgtcaatttcatcgaccatactcgagatgatggcaccttttaagtgttggccatatttagcagcgtacatttggaccaatgcgccaccccatgattggccgattaagtagaagttgtcgatgcccagtttttgacggacttcttcaacttcatctaagaagtaatcatatgttaataattggtcattgcctggttgtgagtaatcaggttgatcagaataaaatgaaccaagttggtcgtacatgtgtacttgtacaccaagatcagctaattccttaccgaagttttcccagtattcgtgattaccaccagggccaccgtgtaagcagagtaaatgaatgtcgcctgttccttgcgtattagtccataaatggtaaccattatccaatgtgaggattgttgttccttgtttcatatctgcaccatcctttaattatgatagtttcattataaacctattagagagaatgtgcgagggtcaacatgatttagttgagcgtttctaattggcgtcgaatggcaggaacagcctgtttattccccgttagaatgaggtgatcattgagatggatttgcgtgtcaccatgcggcatgatcagttgcttatcgcggtaaattcgactaattgtgacttggtccacaaatgggagattagaaagttgaatcccggtgaagcgccgatttttaaccgtgacttcgaagagcccggcatcagtgttatcaatgatttgtaaggtagatggagtctcgattaaacttcgcaacagactgatatttgcttcgtaagtgttaaaaatttcaacgccatgttctttaagttcatcgtattgatcgtccgagatattcttaaattcaaagcgggcgatgatccgcggtactttggcctgaatcgcttgttgggcaagttgataattttgctcattatttaaatagcctaagaccaggatatctgtatcgaagacggccgcgtcagttaaggtggctggtgccaagtcaggcaagagttcgaggttggcttggctatggtagatttgataattttgttcgttattggtaaataattcgcttgtgtacagacctttggataactgttgggcgattggaattgtcatgatgttggcgccgatgaagttaacacgtttgcgtggcatctcttcaggcgttggtaagtagaatcgattgaacagaatcggaccaagaatacagctaatcaccgctgcaattgtgaaagcgccggattgctgtgtcgtgataaccttcaagttgagaccgaccgtcaaaatgggtaagaccaacgtgatggtcgtcgaactgaggaaagtcccggcgagggcgttggtgactttgaagcgccgttttaagacgaagtaaatcaaaactttggcgcccatgaaactgatgaagaaaaagggaatcagggtcagtgatttaggatcacgtaagagcgcggggatgttgagttttgcaccggtcataatgaagaagatgggaatgaaaaagccgtagccgattgatgttaatttatcttgcgtctcttcacgggggcgtaaaagtttcatgaccatgccggctaagaaagcgcccaaaatactttcggcaccgacttcttcggcaatcgatacaagtgtgatgattaagaaaaaggctaaacgaatatcgagttgagtcgttgacttatcaatccgctcaaagaagtgataaacagttttaaaacgcatcaataagaagatcgcggctaagaaaattagtgatagtaaccacagactcttagaaccaggattattgagggcggcataaattgttaacgaaatcagcgggacgatttccccgaggacggcaattaacagaattgtttggccaagcggctggctgaggagttctttttctttcaacgcggcgatgacgacccctaacgcgatggttgaaaagagaattgttgcgagtccaatatcggtgaacaacccactccatgccaataaactggcgagtcctagcgaacttaataggatcagcgtaaaactaccgactgccagttgtaagggcgtcagcggtgttttaacgccagatttagctgtggtgggttgctttttaaagagttcaaagtcgatttccatcccgcttaagaaaattaagacggtcacacccaatgatgaaagttccgtcagtgtgggggtggttgagatgaggtggaagccactttgtccgagtaaaatcccgaccaaaatttccgcaacggcggttggtaaataagaaatcttaaattttgccatgagtaacggcgtcattaaagccgccaatagaacgattacgagcgctaagcttgtcataaaaaagatcctttcaatgctcaataaagttgtgtagagcatacactaacctactaaagcatgtcaaagccgaatagcttccgagcaacagcacgggttcgtaaataggcggtgtagccgactgtttgcgggccacagctgtgcacaggaagttggctttgatagctagatgggtactaaagcatgtcaaagccgaatagcttccgagcaacagcacgggttcgtaaaattggctttttatatattggcgctaatattatcgattttgttgataattcgttagtgattaaattattattaaaaagttggcattatcgctagttaatatctacaactaatttacaattggtaataacttctgtaaaatagatgctacgatattaaaaaggggggcgatctaaaatgaagataaaagaaagtctcgcggttggaatttttgccttttttggcgggattttacgctatgcaattgggctcggattgcaccaagcagcggggtttccgtatggcactttgtgtgtgaatttaatcggggcgttttgtcttccttttttaatgcgttacatcgtggttcgttatcagattagcgatacgctggcacttgcaatgggcacgggctttttcggagccttcacgactttttctagttttagcgtggatgcattgaagttattggtggccaatcaatggtggccatttagcctgtatatcgggattagtttgattggcggtgtctgcttaagtttagtggcagattactgggcagtttggctgctcgatcggcaaggaaagtcgcaggtgctaaaatgatgacgttattaattgtcggattgggcgcggcaatcggcgctattttgcggtatcaattaacccgtcttggaacgcagattgccagcgaatatccattaatcacctttttaattaatttaacggggagcttttgcttaggttgggtgaccggggcacaattggatcaaacgtggacgccctttttgggcgtcggggtcttgggtggctacacgactttctcaacgttcaatagcgaattgagtcagctgtggtttcgccgccgttaccatattttctttggttatctgctattaacctacgggttagggctggtggttgcagcggccggcttttttgtaggaagatcgtgaaacgtgctttagcaaataactttttccgcttagctacatcaggaaaacaatcgactacatcgcttatttccctgattaggctaatgctcgaaagttaaaccgtttcaaacgcactctaaacgtgctccgataggcatatttctacgcttaaccaaatttaccgaaccgacgattgcatcgccaattcggtaaatccagttaatgctcaaaatataagcgcctatcgtcgcactcttgtgaatttagtgttaaacttgtagaactgtttatttagaaatcgggggacatctgctttgactgacgaacaaaaatcattagaacaacgccgtttaaccgagattgtcggtttaattaaaaacgccgaaaagcacttcgaaggcgccgttgaacgggctaaatcagaagaaaaagaaattaacgcaaacttctttaatgatgtacggttgaatttcaataatgattcagcaatgactgaaacggcagtctcaatcgaacaacaacggcaaatgttgcaagaacggaataattcttggcaacaatcttcccggcaacttgagactttacaaaaaatggaaaaaaccccttatttcgcgcggattgattttaaagaaaagggtgaaccaaagtctgagtccatttatattgggctagggtcattcaccgatcgcgaagatcatttcttgatttatgactggcgggcacctatttcatcaatttactatgaagggaagactggtgaagttacgtaccaaacgcctgacggcccgcaagacgtcaatatttctttgaaacgtcaattcttaattgaagatggccaaattaaggcgttatttgatacgcaagaaacaattggtgaccaaatgttactggaagtattgggcgaaaagtctgatacacaaatgaagagtatcgtgacgaccattcaacgggaacaaaatcaaatcatccggaacactgacgcggacttattgttcgtgcaaggggccgctggttctgggaaaacatccgcgattttacaacggattgccttcctactttaccggtatcggggtaacctggattccagtcaagtgatcatgttctcgccgaaccaattgttcaacgattatatcgctgacgtgttgcctgaacttggcgaacaaaacatgattcaaatgacttactatcaatatgttgcacggcgtttgccgaaccttgctgttcagagtttatttgaccaattcgaaacaccaatcacggaaactgatgcgcggattagccgtttgaaagaaagcctagtcttctataaagcagttaaacgttacgcagcgcatcttgaaaaaggtgatatgcgcttccgtgacttgaaagtgaacgggaaggtcttgattagtaaggaaaaaatcagcgacgtctattaccgtttcaacgaaaactatcacttaggaaaccggctagacgcgacgaaggaaagtttattgcgcagtttgagccacaaagtcgaccatgaaacgaaggctgactgggtgacagaacgcgctgaaaacttaagtgatgaggaactccgcgaaattatggcgggtaaggactttaagactggtgaagcggaaagtaaatatatcgctaagcaaatcgttttgaaggctttcaaacccgttcaaaaaggaattcaacgcaatcgcttcttgagtattcaagcacaatacgtccacttcatgcgggttgtgccgcaattggttgatttggctgaatttgatctgacaccagaaatctggaatgatcatgtgactgattttgtcgctaatttaaaggccaaacaaatgacgttatcagatgtgacaccttacttgcatctttatgatttaatgaccggtaagcacggcgaacgcgacatgcgctttgtctttatcgatgaaatccaagattacacaccatacgaattggccttcttgaagatgcacttccctaaggcgcgcttcacgttactcggtgatttgaaccaagcgattttcaccaaagaaaacagcacgaacctattacaacaagtgcaacaactctttgatgcgcaaaatacgaaggtcgttcaattgacgcgttcatatcggtcaactgaacaagtcaccgactttaccaaagggctcttaaagggcggtcaaaaaattgaagctttcaaccgtgaaggcgacaagccaaacttgattgtgcgtcaaagcgaagatcaattggtcgctgatgtgaatgcgcaactcgctaaaaatgaagcagataagttaacgacggcgattatcaccaagacattggtgcaagcccaagaactaacagctaagttgaaagccagtggcacaaaagtcactttaattcgttccgaaaatcaacgtttggcagcgggtacgttagtcgttccaagtttcttagccaaagggttggaattcgatgcgattatcggctggcaagtcagtgcaaccaactacaatcatgaagatcaacggcaattgctctacacgatctgttcgagagcgatgcatcgcctcactttattagcaacaggtggcatgtcaccattgattgataatgtggatgcggatgattacacgttaattaaattgttaattataaaaagattaaaattagatgatgaaaattgcggataaaatgaagctccagcgcgaccattttgatgacatggaaccgaatacaaatatcggcattaaagaagtttacacatgttgcataatcatagatagggattatctctttaaaagatttaacagattcgttttaaaacaacttgtacacaatttaatagcttatcagaatgaaaaaacattaagtccaattggtgattaattgattgaatctttgatatcccaattgataactagaccgtaccaaaggtgtagtgatgaatggaaaaatagaaaaatcatatggaggtagacgatggatagaagaaaattagcgctgggtgcaacaatgctgaccatgttattgacgtttatctgtatcaatagtggtcgtactcaagcagcgatacccgcccatattccaatcgatggcatctttaaaccctccattggggtagatagttccgttcaagcaggtggaattgtgcaagtgacaccagatagccagaacaagaagggggcaatttggtcggaagagcagtataagattgatttgacacataattttacaagtttaatgtatgtcaatttaggggacaaaaaagcgcaatcggttgacgggatggcctttgcaatgatgaatgacccagacaaggttaagaattggcagcaagtgaccggtggcgcccttggtgtttggcggaatccattttcttgggtaaaagataactcagcaatcgccaagtcatttgccgttgaattcgatacgtaccataatggcaatgattttgacggtttgctacccaatgatggcccagatagaggccatgttgcttataattttccaggacaagatagtgcatatcagcgtttaccaagtcgcttgtacgcgctaaaccatctacaacttcaaaaaccgcaaaatggtgattatttatcattagtaacattaggccatatcgtgatggcaccaagtgtacaggctgcgacaacatcgaatgaaacaactacgaggaaaattgcactagaagcaggggacacaacaacgactaacccaccaattgtgccagggacagatggaaacggaaacggaccaactggcgcaacaggggatatcacgattgataatttaacaccacttgattttggtaaggtgaaactgactggtggcgcgcaaaacgttaagaatatcgttaaagatcctaacgtacaagtcaccgataaacggggaactggcgctggctagaatattaccgttaaaagttcagaatttaaagacacaacggattcaacgcatatcttaaaaggcgcacagattaattttccagtcggtaaagtagtcgctagtgattcaacgaatactgctgcaccaacagccaaagcgattactgttcctgctgatgggttggataatgcgcaaatcttgatgagtgctgataaagataaagggatgggaacatgggcagatgtgatgacaactgacggcattacactggatatcgctggtggcgcttatgctggcagctataatgctgatttgacctggacacttggggatacaccgcttcaattagctggcagcagccgctaaatttgaaagaggcaagtgttaagtcgttactgcaacggactaaattttaatcgatgtgcaaagtgattaaagagagggacttcaaaaatgaaatggatgcatattttacaaagaatcagcgtcgtcatcttaatgggcggcatcgcgttgtggttgaatacaacgaccgtccaagcggctgatcagagtatgaattaccaagttaaagcgaatttacccagcagtcaaaacaatcaaagtgtaacatattttgatttaaggctggcacctaatcaggaagagacgattagtatcacggtgcaaaataaggataaccaagcgcatatctttaacatcagtccgaatacggcggtgactaatcaaaacggggtcgttgattatagccagtcaaagaaaaaagcggatgaaacggcgcctgctaatattgcctcactgattacgggggataaaaaagtaacggtgccggctcacagtagcaaggacgccatttttaaaattaaaatgcctgctaagaagttccattgtactttattaggtggttttaatattgttcgtgaagggcagcctaccgttaaaaagcaaaagaatcgcgtgacattgcgtaaccaattcgcttatgtaatcggtctgaaagtgaccgaaagtgatgccattattgcgccaaatctgaaactgaatcacatcaaagcggggctcgttaactatcggacagcaattacggctaatttacagaatacaaaggctgttatgatcagaggcttgaaagttgatgcggtggttaccaagttaggctctgatcaagtgcttcaccggacagtcaaatcagacattgcgatggcaccgaattcgaactttgagtacgccatcaactgggataatgaagcgctgaagccgggcaaataaatgcttaagctaaccgccactgataagtcgggcggttagtggtattttacgagtcggtttaatattacagagcaaaaagcccatcaagctaatgaccaagccgttgatttacaaaaaacaaccattaactggtggtatatcatgtggtggcatattcctggtgctcttagttgggtatattatttttctaaaacgacaagcgaaaaaagcctgattcaatgaagtcccaatcctgagcgcgtcatcgattagaatggattcgaaaataatcccttgataatgaatagatggaagtattatctctattcactaccaagggatttttatatgtgctgcgttattggttgttcggttaattaggtttaaaaaagagggaatggattttatatcacgttatttacgaatgatattcataaacagtggttttttgatgccatttaacgtataataaattaaaaacaaattagagatgaggcaagaatattgatttcgactgaaacgacactagctgggtaccactttgataactgtttcatgaacgcggcgggggtttattgttatgatgctgctgagttaaatcaagtgcaggcttcaatggcagggactttcgtgaccaagagtgccaccgttatgccccgctctggaaatccagaaccacgttatcaaccaacgcgtttaggcagtatcaattcaatgggcttgccgaatgaaggcctaccttattatttagactatgtgagtcaacagcaaaaggcagtgccagacaagacatactttcaatcgattacgggatttaatattgaagaagacgagcaactgttggcacagattagtgcttctgattttaaaggtgtggtggaattgaacttatcttgtccgaacgtaccggggaagccgcaaacgggctatgattttgaaatggtggaacgaattctaacgcgagtttttacggtttatcacggtccattaggcgttaaattaccgccgtactttgatatcgtgcattttgatcagatggcggcgattttgaatcaatttccattagcgtttgtcaattcggtgaatagcattggaaatggcttgaaaattgatgtggcaactgaacgggttgtgattaaacctaagcatggtttcggtggcatcggtggcgattatatcaaaccaaccgccttagcgaatgtccatgccttctatcagcgtttgaatccagccattcaaattattgggactggtgggattaaatctggtcaagatgcatttgaacatattttatgtggggctagcatggtccaagttgggacagcgcttcaaaaagaaggccccattatttttaaacgtttaacgcgcgaattacagacaagcatggctcaaaaaggttatactaaactgtctgactttagaggcaaattacaatatttagattagttgaaatgaggatttacaatgcagtatcgttatttattttttgacatggacaatactttattcgattttgatgcggatgaagatcaagctttggcccaattattcaaagatcaaggggttcaattgaccccaacaattaagacaacttatcagacctttaatcaaaacttgtggcggcagtatgaagaaggtacgttaacccgggaaatattattgaacacacgctttgcaaccttctttaaagaacagtttaatcaggaagttgatggaccaagattgtcccaaaattatttagacaacttggcattaggccatgatttaatgccacaagcagaagctctgttaaaggcgttaaaagcagctaacattaagctatatgtcacaaccaacggggttgccaacacgcaatatcggcggttacaagattcaggattaatcacatatttcgatgccgtttttgtttcggaagagttgggatatcaaaaaccagatccacggtatttccaaagtgtcttccaacaattagaggggatctcacaagcagaagctttgattgtcggtgattcacttacttcagatgtgcaaggtgggcagaacgtgggtgtcgccacagcgtggtataacccgaaccagctagcaaatcaaatgacagacatacagccaacacacgaaattgaacacttaatggacttattggcaatttaaaagccgatttgcggcattcaagaggagtagataaaacatgaaaaagcaacgatattttagaattagcctaggttggcgaatcttaattggaatcggcctagggttagtggttggtcggtttttctaccataatcaaaccgctatctcaatcttacaatcaatcggaaccttgttcatcaatttaattaagatgattgtgttaccaattgttgtttcctgtttggtcgttgggattgccaagatgggtgatatcaaaaaacttggccgaattggtggtaagacgttattgtatttcgaagtgatgacgaccttcgcaattattctcggattagctgtcggcaatattgctaaaccaggagcgctgattgacattcatagtttggcacatggctcaattagtcagtacacagcagccgctaagaccgctggaaatcatggcttgggtgatatcatcatggatatcgtgccaacgaatttctttgcggccttggggtctggtgaaatgattccagtcatcttctttacggtcatgttcggtttagggttggcgacctttggtaaaaaggcaaccccgctcatcgatgcttttgaaatgatttcagaggttatgttcaagatgacaaactggattatgcagttagcaccaatcggggtgtttgcattaatcggggttacaattgcccaattcggatttgaagctttgaaaccattgctctatttcatcatcgtttgttacgcaacgatggcatttttcgtggttgttgtggctgggttggtcgcgcggatttggcacatcaatatctttgaaatcttgaaagttttcaaagaagaattggtgctagccttttcaacggcgagttcagaagcagcgttacccaaagtaatggaaaaagtgcaaaattacggtgttagtcaagggattgcttcttttgtcattccaacgggttattcatttaacttggatggttcggcaatctaccaatcgctagcggcgctgtttttggcgcaagcctatcacattcatttaagcctcacccaacaaattactctattggtggtcttgatgattacctctaaagggatggctggggtccctggtgcttcattcgttgtcttattagcaacaatcaccacaatcggcgttccggctgctggtgtcgccttcattgcggggattgatcggattgtggatatgggacgaactgccgttaacgtaatgggaaactcattagcagcagtcattattgccaagtcagagaacgaatttgatgaacaaaaatatcaacaatatatgagtggcaatgaacttaaataaagcaaagaccttaaatcaatcgatttaaggtcttttttgtataaaaaacgattttagcacaccgcaaacattagcggtatctaattataaaagcttaagtaatgcgacttttagcgcttttttgtcgattatctagaccaatttcgcagataatctaaaaaatgattagacagattagaattttgtggtaaaattaatccagtaaagcgttttaaaaaataaaaacgtggaactgttaactcagtcaataatgtttaagccattatttttttatattaattgatagcgttttattgatgagtatgacaactatttttattaaggaggtttttgtgaatggttggaatcgttattgcaagtcacggggagtttgctaaaggaatcatgcaatctggctcaatgatttttggcgaacaagaaaaagtacaagctgttacttttatgccaaatgaaggaccagatgatttgaaagcgcatttagaagctgccgttgcaacgtttgatgcagatgatgacgtcttattcttagttgatctttggggaggttcaccatttaatcaagctaatgggttgttcgaagcacataaagataggtgggcaatcgttacaggattaaacttaccaatgttgattgaagcttacgcatctcgtttatctatgacatctgctcatgaaatcgcagcacatatcattgatgaagctaaagcaggggtacgggttaaacctgaagaactacaaccagaagaagcacctaaggcagaagccgcacaaacgacttcaaactcaggcacacctggtaagttcaaatatgtcttggcacgaattgattcacgtttattacatggtcaagttgcaacgacatggtcgaagacaactaacccaacacggattatcgttgtttcagataacgttgctaaagatgaattacggacaaacttaattaaacaagctgctcctagtggcatcaaagcacacgtcgtgccagttgatcaaatgattaaattggcaaaagatgaccaacactttggtaaggaacgtgctttgttattatttgaatcaccacaagatgcacttagagcagttgaaggtggcgttccattagaaacaattaacgttggttcaatggcgcactcaactggtaaagtgcaaccaaatactgttttggcttttgaccaagatgatattgatacctttgaaaaactaaaagctaagggcatcaagttcgatgttcgtaaagtgccaagtgactcaaacggtaacatggatagtatccttaaaaaagcacaagcagaactagacaaacaaaataacaaataacatcagaagaaattggaggattaataatcatggatttgaatttcattcaagtgattttggtcatttttatcgcatttctagctggtatggaaggtatcttagatcaattccatttccatcagccagttattgcttgtacactaatcggtcttgtaaccggtcaattactaccttgtcttatcttaggtgggacattacaaatgatcgccttaggttgggctaacattggtgccgctgttgcacccgatgctgctttggcatcaatcgcatctgcaattattttaatacttggtggccaaggaaaagccggcgttacatcagctatcgctatcgctgttcctcttgccgtagccgggttattattaacaatcatcgtacggacattagcaactggtatcgtgcacatcatggatgctgctgctaaagaaggtaacttccgtaagatcgaaatgtggcaatatatcgctattatcatgcaaggtttacgaatcgctattcctgcaggcttaatcttagcaatcggtgctggccctgttaaagaaatgttgacagcaatgccaatctggttaacagacggtttagcaatcggtggtgggatggtcgttgccgttggttacgcaatggttatcaacatgatggcaactaaagaagtatggccattcttcgcaattggtttcgtacttgctactatctcacaattgacacttatcggccttggtgcaatcggtgtttcacttgccctattatacttagccctttcaaaacaaggcggctcaggtaatggcggcggttcaaatactggtgacccacttggcgatattatcgacaactactaagaaggaggctaacaattatggcagaacaattaaaattaacgcgtaaagatcgtatttctgtttggctacgttcaactttccttcaaggttcttggaactacgaacgtatgcaaaatggtggttgggcttactcattaatcccagcaattaagaaattatacaaaacaaaagaagaccgggcagctgctttagttcgtcacatggaattctttaatactcatccttatgttgcttcaccaatcatcggggtaactttggcacttgaagaagaacgtgctaatggtgcaccaattgatgatgttacaattcaaggggttaaagttgggatgatgggacctttggctggtatcggcgatcccgtattctggttcactgttaaaccaatcatcggtgctttggctgcttcacttgctatgagtggtaacattcttggcccaatcatttactttatcgcttggaatgctatccggatgtcattcatgtggtatacacaagaattcggctaccgtgctggttcaaagattacagaagatttatctggtggtattttgcaagacatcacaaagggtgcttcaatccttgggatgttcatcttaggttcgttggttaaccgttgggtatctgtcaagtttacgccagttgtttcatctgttaagttggacaaaggcgcattcatcgactgggataaattacctagcggtgctaagggtatccaatcagccttacaacaacaagctcaaggtttgtcattgacaagcaataaagtgacaacgttgcaagacaacttggatagtttaattcctgggttagctgcattaggattaacattattctgtatgtggttacttaagaagaaagtctcaccaatcgtgattattcttggcttattcgtagtcggaattgtcttccatctattacacttaatgtaaaagagtgcataagcaggcgcctatattttgaggattaactggatttgacgaattggcgatgcaatcgccgatttggcaaatttggttaaccgcaggaatatgcctactgaagcacgtttagaaaacaaaggaggggctaggacaaagtcaatttgtcctagcccctcctttttataaaagcgtataatgaaagtaagtttttggaaatggagtcgatattatggttcaatcgattaatacaaaggtggacttagtgattaaagccacgtcgtttacagcactctctgattacggacaaatcatgatcggggatagagggtttgaatttttcaatgatcgtgacgcacgacaatttattcaaattccatgggaagaagttgactatgtgattgcatcagtcatgttcaaaggcaagtggattccccgctatgctatccaaacaaagaaaaatgggacgtatacttttgcttcaaaggaacccaaaaaagtactccgcgccattcgcgagtatgtgcccgcagaacgcttagttcaatcactaggggtctgggatgtgattaagcgtgtgtttaaacgcaaatcaaattaacttcaggaaggtgtgaccaatattggtcacacctttttttgaatcgaattgcctgtgattttaattggtaccgatttgagtggcgtgctagaatatcatataaggttgattgttcaacattttaaaaaattaagttaaatgaggtaatgatcatgggatttgatgaagcgattaatgcaattaaggctggcaaaaaagtggtacggactggctgggatggtccagaattatttattttccaagtggccgatgggacattcgaggggcaagcaattagtccctacctattaattaaaacaaccgaaacaccagcatactcaatgttccaaccaacatcgtgtgatgtattggctgatgattggcaattggtcgactaatggggcattttgcagatttagcgactaaaaccattttaattaccggggcggcatcgggaattgggtgcgctcaagtggacgcttttttagcagagggggcattggtgttagcacttgatcgccagccgattgaagtccctgttgatagtcggtgcatcacagcgcaggttgatgtttgtgatgaaacgcaattaacaatgacattagcgactttgctggcagaacatggcccaatcgatgtggtctgcaacacggcaggcgtgttggatgcttatgcaccaacgcttgataccagtagtgcggagtgggatcgaattatggcaacgaatttaaaaagtcaatatcttgtaacaaatgcgatcttgccaacaatggttgcgcaaaagcgtggggtattcgttaatatggcttcgattgctgggctagttgctggtggcggtggtgcggcttatacggcatcgaaacacgccatcattggctatacaaagcagcttgattatgattacgccgctaaggggattcgcgccaactgtatcgccccaggtgcgattgagacgccgatgaacgcagccgatttttcggggactggtgagatggcacaagaagttgcccgtcagacaccagcggggcgttgggcacaaccaactgaagttgcgagcttaagtgtttacttggcgagtgatgttgcggattacattcatggcaccgtcgttccaattgatggtggctggattgaaaaataacgctgactaaggagattatgatggcaaaacaaattaaattaagtcaaaccgtttatgaattggtaacggcctatcctgaagtggtgtcggtgcttgttgaaattgggcttgatggggtcacgaacccagcgcttttgaatactgcggggcgttttatgacattgcctaaaggagctaagatgaagcaaattcctttgacgacgattatcgctagtctagaagcacaaggattcgaggtgttagctgatgtgtgagcaacagcatagcagtgcgtaccgccaaaaacgaatcgtggaaatcttaaaaatgctgcatgaaggtggctcgtttgaagaggctaagcggatttttgatgagtccttttctggggttgacgtgtctgaaattacgtctgctgaacgggaattgattgccagtggcttgaacccgatggagattcaacatttgtgtaatgtccatgctgcggttttcaagggggcgattaattcaaatggggctgaaacgccggaacaagaacagccaggacacccagtcgctgtgatgaaattagaaaatttggttatgaactcgctcttaaatgatgaattactgccatgtttgaagaaatggcagcagtcagggactgaccaaaattatctcgtgcggatgcaacaagcgttaaaagatttacagttgatcgaccgccactatttacggaaagaaaacttaatttttccgttgatggatcaatatgggattactgcaccacccaaagtgatgtggggggtggatgatcaaattcgggggttggtgaagacggcctatcaaatggtaactgcggaaccaattccggataaatatgcaattgaagcagccgttgaaaagatgagcaaagaaattcaagaaatgattttcaaagaagaagaaatcatgattccgatggttaatgaagtctttacaccagctgactggggactaattgcttctgaaagccaaccaatcgggtataccttaattccagacccattaccatggcaaccaagtgctgaagctattgcggcggtcgaaaagcggaccgtgccgaagattgcgcaagaactgaatgcgatggcgcaatcgttggcggatgcgcaaatgacgatccaaacaacgccaccagaaccggcaccaacttcgatggcggcagcggctaatattccgtttgaaattcacggacaacctgtaccaaaagcccccgctgaaaaagatgaaggaaaaccagaaatgccagattttgtgaaggcaatgttagctgacgaaaaagaagcggcaccaaaagcgaaggttcaagcacgtcgggaagcaccacaaccccatatcgaaattggcgtggataaccaagctaaaatcgttctaccatctgggtcgatgaatatcagcgaattgacggcgattctccaagtactaccgcttgatttaacctttgtcgatcaaaacgatattgtgcggtggttctcagataacgagcatcgtattttcccaagaacccgggcagtgattggccgcgcagttgtgaactgccatccaccaaagagtgtggataaggttgagaaaattttagcggactttcatgcagggcgagaagacaacgctgatttttggttgaacttccgcgggatgttcgtctatattcgctattttgcggttcgtaatccacagggacaatacttaggctgtttagaagtcagtcaggatttaacggaactccgtgcactaacaggcgaaaaacggttataaaaatgcattaagaggagaaaagagatgcaacaaattattttattacttgccgtcggtgttttagccggcgtgttgggttcaatcttagggattggtggcgggatcattgtaacccccgtattaacgctagcgattggcctagatattaaatacgcgattggggccagcattattgccgtgattgcaacaagttctggtgcaactatcgcctatttgaaagatgatatgctcaacttacgagtggcgatgttcctagaaatcgcaacgaccgtcggggcgattatcggggcgttattgaccggcattgtaccaactggattcttattcatcttattcggcgcattcttgctattttcaacgtacaacatgattcaaaaattacgtggtaaagttgcagaacaacacgtcggcgctggtgaagataagtgggccaagaagttgaacttaaatggcacttactacgataaggccaaccaagaacaagtcgactacgctgttgaacaagtaccaggcggctttgccatgatgttcggggccggcattgcttctggcttgctcggtatcgggagtggggtattcaaagtgaccgccatggatacgattatgaagatgccattgaaaccatcaagtgccacgagtaatttgatgatgggggttacggcagcagcttcggccactgtttatttcttcagcggtgcgattattcccagcgttgctgcaccgttagcaatcggaattttggtgggttccactgtgggttcacggattatgcagtatttgcaaccacgtgtgattcgcatgatttttatccccattttgttatacacaggtttacaaatggtgcttaaaggattcggggtgcatatttaatgacagataaaaaagcagagatggctcaaattgaactcgtcatcggtaaaattttacgcattggggtggcggtttcagcaacgctgctcattattggcatgttacttgcgattattcatggcggtacaggttattcagaatatcaatttccaacgacctttaccgaaattttcagtggcattgctgcatttaaggctggcgctgtgattatgttgggcttattctgcctcattttaacgccagtcttgcgtgtggtggtatcaatctacgcatttgctaaagaaggggattacctctacgtttggattacggttattgtgttggtcatcttaatcatcgggatggcaattggttttataaagaaataaagagtggtttattagctcagtatctcgcgaggattaaaaaaagggccaacgacaaacatgtttgtcgttggcccttttttttgtggtgaattaggctaatccgcagaagataaccgggcttactgcgcactctgatttaaaacgtgctccgacagacatccgcttccggttagctacgtcccgcaaacaatcgacgtcgtcgcttattcacgagattaggctaatcctcagcgtataatcgtctgccgtcgcactctactttgaaacgtgctccgtaagccatcttcttccggttagcgacatcagtcaaatcaccgactttgtcggcaatccgcctgattaagctaatcctcagaagataaccgggcttactgcgcactctattccattcctagtattcttttctttttttcttcgaattcttcgtgggtcattaggccgtcgtcgcgcattttgaggtaagccatgataagatcaccggtcttaacataactgaggtcttcttcaacggttggtttttcgagatagtccgctaaggctgtgtataacttgcgcacagcgaggttatcgtcgggttcgaaactgatgacgattttttcgagggcgtggttgggtttttggtagagaatttggagatgaccatgccgataagtcgcttcaaaaaagcggactgattttaatttgctaaacggaatgtcacgatcctggttttgtttcttcttaaacagtccgggatagtgaattgttaggatattttcgtcataggttaattcgagtttttgaggttttttaatgagataagtttgcatcgcttgctcctttaatcattcttaagtaaaagcacggtagttcttaataaatgaagcctaaacttacctttatcatagtagacagtgaccctaaatagcaagctgttcgtattggtttatgaaatgaggtgggatgatgaaattttttatgggtattcgcaacggcctgttagtggcattaccgatttggtgtttaataatcttctcaattacgtattggttacgctaaaataaaaaaacgggcgccgcacaaaaactgtgcagtgcccgttttttaacgtaaattggctgttttttaggtctaaagacggtttttatgctagtatgaatagattacaattagtgacattgattgcatctaggcgatgtaattattataatgaaatcaaatgtccaaagataaggaggaggaaaccaattgaatattgggatatttacggacacctactttccacaagtcagtggtgtggcaacctccattaaaacattaaaagaagccctagaaaaacaagggcattcggtctacatatttacaacgaccgatccacatgttgacaaagatgcagtcgaaccgaatattttccggtttgctagtgtcccgtttgtctcatttacggatcggcgaattgctgtgcgcggcttatttcacgcttatcaagtggctaaggaattggatctcgatatcgtgcatacccagaccgaattttcgatgggctacatcgggaagtttgtcgctaaaaatttaaaaattccttgtttacatacgtatcatacgatgtacgaggattatttacactatgttttaaacgggaagttattacggccataccatgttaagcaaatgacaaaggcctttttatatcacatgtcaggcatcgtggcaccatcagagcgggtttctcaaaccttaaatggctatcaagtgaaggcccccatccggattattccgaccggggtcgatattagtcgctttgagcgcgaagtgacccgcgacatacgggccgaattgggcttgacgtcagaacaacctgtgctcttatcattgagtcgcgttgcttatgaaaaacggattgatatcttagttgatgcgttacccaaactagtcgcccaaacaccagatttaatgttagtgattgttggtgaaggtccagctcgagaagatttagaagctcaggttgccaagttaaacatgaccgaccacgtgattttcactggaatggttgataacgatgaagttgcaaattattatcatatggcgaatctttttgtctccgccagtgactctgaatcacaaggattaacttatattgaagcgatggccgctgaactcaagattgtcgtcatgacaagtccatatgcggctgagttattaactgatccttcaattgggacgacatttacgaacgaagatgaaatgatccatcaagtatcgaattatttgaatcatccacatgcatttgatgatccagcaccgcgccgaaagaagttgcatgctatttcggcggattactttgcggaacagatgattcatttctataagcaatcacagctattatatgacgaattaaagttagaccaagatgatttattggaattagaagatttagatactaaaaaataagtcgcgctggcggaaaactgttgatcatataatcaacagttttttcatatcgttgctaataacaagaaaaagggtcgtttatgagtagaacgaataagattgtttttgcagtcatgctgttgattgggtgtgggatttttgcctatgaaagtcgcacgctggcgttgaaacagctgtttatcgatattagtcatctgaaactttggtggctgttggtcgccttattatgtatgttaatttcgtggtttttcgaagcacttgtcttacgcgtctttctaaaagaccgcacagaacacttttctttatacaatgcgcttcggattccgttgattgcacaactattcaatgcgattacaccgttttcttcaggtggacaaccggcacaactggtagcgttgatgcaatcccgtgtagaagctgggcaagctagctcagtactgctgatgaagtttattgtttaccaattcatggtactggtgaatttcttattaagtatgatgattggtctctcgcaagtttccaagcattttgggacgctgtcgattttgattactttcggattaatcgtgcatgtggttgtgttagccgtattgttgctaatcatgtattacaatcgatttacgaaacagttagtgcactggttattaattccggtgggctggttcgtctcccaaaaacgggtgacggaatggcggacaatgttaatggccaaaatcgataccttttacgcggagagtctacaccttaaacgcgagaaaaagaaactaatcaagggctgtattttaacccttgggcaactttttttctattatagtgtgccatactttgtcttattggcacttggcatcccgcatgttaattatttagaggtgatggtcttacacatcatgattgtcatgattgtctcgctctttccagttccaggcggttctggtggggcagaatatagttttaagacgttatttgccacttttatcccgagttcaagtaaactggtgttaggcatgttgctctggcgattgtttacgtactatctcgggatgttcatggggattggggcgttagcagttaaaccacgagtaactgataaaaagtaggaggcgtttttgatgcaaccaacaattggcttcattggaacaggtgtcatgggtagtagcatggtcaagaatttattgaaggcagactatccagttgtcgtgtataaccggacaaaacaaaaagcggatgcagttgtggcactcggtgcaacatgggctgattcaccagcagcggttgtcgcgcaaagtcagattgtgttatcaatcgtcggttatccgcaagatgtcgaagccatctattatggtgaagacggaatttttagtgctgcacaacctggtcagattttggtggatatgacgaccagcacgccaacattggcgcagagaattgccaaaacagcagctgacaaaggtctgcaagcattagatgcgcctgtttctggtggcgatatcggcgcccaaaacgggacgttgacgattatggtcggtggcgatcaagctgcctatgaaacggcattacccttttttgaagcaatgggtaagactgtccatcgcttcggtgctgccgggacaggccaacatacaaagatggccaatcaaatcatgattgctggcacaatgaccggaatgacagagatgttagtgtatgctaaagcagccggattagaactagaagcggttttaaacacggttaatggtgggagtgctcagaactggagccttgcaaactatggtccacgtattctagcgcaagactatacaccaggctttttcgcaaaacattttttgaaggatttaaagattgcattaacggaatccgaaaagatggggctccatttaccagctacgcttcaagctaagaaactctatgcgcagctcgttaatgataaacaattaggcgacgatggcacccaagctttaattaaattatggtggccttctgcaaaataattggatataaacggtgcagaagtgctctttttctgataaactgatagttagttattaaaggaggcttcgccatgcaatcatcacagttagttgcgattatcaaacgtctggtagcaatgcaagaagatcaaagcgctgaggttcaagaaagacgttttgaaaaggacggcgatttaaaagcaactgttagctatgatcctcaagctcaagcatttgaacttgaagacagcaacacacatcaacaattccaatttgacaatattgatttagttgcaatggaactatacgatttattagcagactagttaattaaccattgagtatcgaattacttgatggtttttttgctacttaagcaggtgatagccttgctcagttgcgactcagattattaaaaatggtttaatatttggcattcaagccggttacatattgcttttcatttcacggatgtgtaaactaactttcagattgtcaacggcttttaaagcccaacgacctttaacggaggctactgtatcgatgaaacaaattggtcataaaattcaatcaggattaagcacacgatggggattcttccttttcgcagttgcgctattctggcttaaaacaatttacgcatatcaaacaaaatttaacttaggcgtcaaaggtggcatgcaggccttcttaatgacgattaatcccattccaacaaccttattgctatttgggattgccttgtttatgaatggccgaaagtcatacattacgttgattattattgatttaataacctcaacttggttattctcgaatattttgtattaccgtgaattttcagacttcttaacgtttaacttaatgaagggctctggtgcggtatcaaataacttgggcaagagtattgctgggattattgaatattctgatttcctagttttcgctgatgttttattgctaatcatcttattggctactaagttagtgaagattgatcaccgtgtctttatgaagcggaatgcatttgcaattactgggttagctgttgtgttattcggtgccaacctcgggattgcagaagcagatcgttctgggttattaacccggacgttcgataacaactacatcattaagtatcttgggatgaatgcatacactgtctatgatggcgtgaagacgaccaagaataatgcgattaaggctaatgctgatagtagtagtatgagtagtgtcttgaagtatatgaaggacaaccgggttgcacccaatgttgaatacactggcgtggctaagggtaagaacgtctttgttatccatttagagagtttccaacaatttttaattgattataagtgggacggtcaagaagtcacaccaaatatcaataagctatatcacgaccaaaacaccctcagtttcgacaatttctttaaccaagttggtcaaggtaagacggctgatgctgaattaatgctcgaaaactcattgttcgggttacctgaaggggccgccatggtcactcaagggacaaccaataccttccaagcagcaccatcaattctagatcaacaaggttacacaaccgcttcattccatggggatgtgccaagtttctggaatcgggataatacctacaagtcatggggctatgattacttcttcagttctcaatactttaaagaaggtaaaggctacaacgtgggttatggcttgaaagataagatcttcatgcaagactcagcccaatacattgaacaattaccacaaccgttctatgctaaattaatcaccgtgacaaatcactatccatacttattggataaacaaaatcaatcaattgctaagaccgatactggtgatgatacagttgatggttatgtgcaaaccgctaagtatttggatcaatcaattggtgaattcttagcttggttacaaaagactggcttagataagaatagtatgctcgttctatatggcgatcattatgggatttcagggaaccataagaaggctgttgcgaagttattgaatcaggataaatttactgattttgataatgcgcaattccaaaaagtaccgttcatggtgcatatggatgggttaaaaggtggcgttaaccatacctatggtggtgaaattgacgttttaccaactttattgaacctattaggtgtaaaaaatgacgataccatccaatttggttcggatttacttgcgcctaaccgcaatcagacggttgtctttagaaatggggactttgtcacaccacagtatacgaaggtaggcagcacctattacgatacgaataatgggaagacgctgacgaatttaacggcagcgcagaagaagcaattaacggcaatcagtgaacatgtaacggaagaattgtcactttctgacaaggtaatcaccggcgatctacttcgattctatacaccacaaggattcgaaaaaccagataagtctaagattagctacaaggtgaaagatgctaaagctaagttgaaagacagtaacaataaaacgagtgttatccagcaaaataatggtaagtcaacaatggacctttatgagacggatgcacctgaattgaagtaaagtatgtaaagacgttacgggactcgcgtaacgtctttttttgagcaaagatacttgtcagtctcgtcaaaaaaaggtacgattacagcaataaggatatatgataatgattatcattagcgaaaggtggtggcaaaatgagtcacatcgtgcaacaaacgttacggaaactcaaagaacacaacgtacggatcacgccacagcggcaagctgttttggaattcatgattggcactcatatgcatccgactgcagacgatgtctataaggcgctagcagggcgctttccgaatatgagtgttgcgacaatctataataacttgcgtctgtttacctcattagggattattgaagaaatggcttatggagatgcatccagtcattttgattttgcgcagaccaagcattatcacgctatttgtgagaactgtggaaaagtagttgatgttttttatccggagttagatgatgtagaagtgattgctgagaatctaacggggtttatggtaactgggcaccgaatggaagtgcatggtatctgtccagaatgccaagcaaagcttgcaaataactaagttgtttgaatatttagaaaaaagatgaattttatgcaaattttacttgacgatagatttagatgttggtatagtattctatgttgtcagcgagagaaaagctcatcgctaacgaaataacgggtcaaacgagattgaataaatattcagaaaatatttataaaaatcgcttgacagtgttcgttagaaatgatatattaattaagctgtttcaacacagtagatctttgaaaactgaacaaagtttcgataaaccaaatgtgaaataaaaaaatcttccttatcccttttgtatcaacatttttagcactttaagacaaaaaaatagaacacttaaaagtgttctaaaatcgcttatttaaggagagtacaggatttgaacctgcgcgccggtataagccggttcgacggatttcgagtccgttgcattaccactctgccaactctccagaacgttattcattataacagacttctaaagaactgaacagcgtaaaacgcaaaaaaacctacgtgcgcccacattctattcgatcaccaccatcccatcttgatcaaattgccagtcctttgagtaagcgacttcccaatagtaaccatcgggattactgaaataaccactatagccaccccactcgccccattctggcgctttgatgagcgtggccccgttagcgagagctgttttaaatgttgcatcgacttccgcttgactatgcgtattaaaggcatgggtcacgccgttgaacgttcttggaaatggatgattatctgcggataagccaatatcggctagtagtgcagtgtacggaaacaattccaacttggtcccagtattattgaaaaagacgattgtctcagcattttctaaattcggcgcttgaaagccgagtgcttggtaaaactgccgtgacacggttaaatcctgaacacctaaacaaattaaatggatactattcatcaaatcacctactcgttttaaattaacctgattgtatcaatccgaagctaataacgcaattctccctgttaattggccaattattaaatttattgaatcatatttctttttataaaaaaattcgttatacttaaagaatcttaaatgatagaggtttattaatatgaagatttcttatcgcaaactaccgtttttattcaacttaattttcttagttgtaacggttttacaatctttgatcattctagtggttaacccccacgttacgaaattcatccccacttatatggatgccatggcgaaagtatggtggttgtgcattattgctattattttgcatattgttgcttatttattatcactcgatcagaatttgattttactggcatacttatgtgcaatcgtcgcttacatcatcttgattttagtccctaatctattactagttgcccttttcttgttggtggttagcttgatcatttcatttaaagtctatcatttccattatcgaacacctgcttagtcctcgtcggagggctatttttttatgcgccaacccacttaatttatggtataattagtttgaaattaaaacaaaagaggttctagtaatgaaacgattaactgcgattctatctttattggtactttgtttactgccttttgtaagcccttactttttcgataaaggcatgcgcttttctagcaatcatcaaaaaaatccaatccgctttgaagtttgtcggcatccaaaggtccaccacgcagtcgatcgtgatggcagtgaacaaaaattaaacgccttcaaccaccgctgcgaacggttctttaatcaactcacacttgcgcctgaagcattctacgccgtagctagatttcttggatttaccgtctttattctattattagaaccactacttgcactcctaatgaccctcaagaaagtgccacaacccaaaaaggcacaatcccatactccgcagaagcatcagattgcgccttataagtggcatttattagattagtttaagttcaacttttgataagtataatggccctcttttagtgattgattcgcatatggcgtctcattgagcaacgccacatattcttgggcccgttgttccgaactaaacgcccggatcattttacttttatcataataaagtgggtttgcttgatataaaacaacgtagatccattgattcatctgtcatcacctaactttgtaatccacataaagaaagaccaactcgtaatgagtcggccttttttaatgtcatcttaacgacgagcttctttgatacgagctgccttaccacgtaatgcgcgtaagtagtataacttagcacgacgtacacggccatgacgagtaacttcgatttgagcaacacgtggtgagtgtaatgggaaagttctttccacacccacaccgctactgattttacgaactgtgtaagtttcactcacgccaacaccatgacgtttgataacaacaccttcgaataattggatacgttcgcgagtaccttcgacaacacgcacgtgaacacgtacgttgtccccaggacggaagtcaggaatatctgaacgtaattgagacttagtaatttcttgaattaatggattcattttgaatctctcctttttccacagatattcattaacgtcttgcgccagcggaataccgttattttgtgactaatcatcacaatttttaattttagcataattcaactgagaataaaagccttatttttcagccgcttcttgcttaatttcttgtaaccagtgcaactgatccttggtcaacgtcatcttctctagtaagtctggacgccgttcatatgtccgtttcaaggacatcttctcgcgccactcgttaatgagcttatgattcccgttcatcaagacttcaggtacctttaaaccgcggtattctggtggtcgcgtatattgtggatgttccaataagccggtcgaaaaagaatccgtaaccgctgattgttcattccccaagacgccaggtacaagccgcgaaatggcatcaatcatcaccattgcgcccaattcgcctccagtgacgacgaaatcgcccaatgagacttcatcagtgactagcgtgcgaatccgttcatcatagccctcgtaatgcccacagataaaaaccaagtggtcttcttgagcaaattcttcggcaactttttggttaaacgttaccccagctggatcgagcaaaataacccgtttgtgccccggattcttggcattcacttgatccatcgcctcaaaaatcggttgtggtcggagcaacatccccgcacctccaccatacggcgcatcatcaaccgaattgtgtttattgactgaaaaatcacggaaatccgtcacttctaaatcaattaagtcacgatcaattgccttaccgataattgattgggataacccattttgaaccatatctggaaataaacttaagacatcaatcttcattatcaatcaatccttctggtacttcaacgtaggctttacccgcttcaatatcaattttcttaacgactgacttcaaaaatggtaagagtaagtctgaacggccgcggcgcttgatcacccagacatcgttgggacctggatcgatgatttctgagactttcccatagctggtcccatcggcttcttcaaccacttctaagcctataatatcaccgtagtaaaactcatcatcttccagatcatcttcgcgttgacttgcagcaatctttaaattatggcccttgaactgttcaacatcgttgatattgcccattccttcgaactgtaatagatagaattgcttgtgttggcgcattgccgccactttaacatcaacaaggccattgggcatttcgacggccagttgcacgccttttttaaatcgtgaatccgtaaagtcagtcgtcgcaatgacccgcacttcaccacggatgccgtgggtattgacaattttaccaacttgatagtatttttctggcatttaatttctccttaatcgacaaaaaacgcctaaataaaacatctctgcttcatttaaacgtttttgttaggcatctacaatatttaaacggacccgtttttggtatggtgctttcacactatagacaatggtacggatggactgtgcaacccgtccctgcttgccaatgacgcgaccgatatcacttggattaacctgtaagtcaaattccataaaacgttctgtctcatgttcagtcaatttgacgtcttccggatgttcgacaagtggctgaacaattgcaataattagttccttcacgtctgtcataacgaatccctactttttagcgaagcgtgcttcgtgatatttttgcataatcccttgttttgataaaagattacgaacagtatcagaaggttgtgcgcctttttgtaaccaatccatgataacttcttcttctaacttcaagtcaactggttctgttaatggattgtagtaacctacttgttggataaagcgaccatcacgtggtgaacgtgaatctgcaacaacgatacggtagaatgggcgtttctttgaacccatacgtttcatacgaattttaactgacattaatgccacctcctattaattctttaacatgtcataatataccaaatttcaaacgccgtgtaaagtgttttttctttacaggacaaatttttttaagatttaaaacgacgcgcgtttttgagacgtttcttcttgtttttcttttgttttttcatcattgaattcatggccatcttacccattttacccttgataccgttgcccattaaaccttccatgccgttaaagttgccctttgacatttggttcatcatctttttcgattgattgaattgtttgatcatccggttaacttcaacgattgggcgaccagcaccagccgctaaacgacgacggcgactaggattcaataagtcaggattttcccgttcttgtggcgtcattgattgaacgatggccttcatatgcgccatgtctttcggatccatcttgatgttcttgagttgtgggttattagccatccctggaatcatcttcatgatatcttccaaaggtcccatgctctgcaattgatccatctgatccaagaaatcgttaaaatcaaagctattttctttgatcttttcagccatatcagctgctttttgctcgtcataatcttgttgcgctttttcaatcaagctcaacatgtcacccatcccaaggattcggctactcatccggtctggatagaaaatgtcgagttgatcaagtttttcgccttgaccagtgaacttaattggtttgccagtgacggcgcgaattgaaagggctgccccaccacgtgtatcgccatctaacttggttaggacgaccccggtgacatctaaacgactgttaaagccttcagcaacatcgacagcggcttgcccagtcatggcatcgaccgttaagaggatttcatttggatgggctagctcattaatatcagccaattcttgcatcaaggcttcgtcaatttgtaaacgaccagccgtatcaattaagacgtaatcgttcttttgtaaggccgcttgtgctaacccttgacgaacgatttcaactgggttgacatccgtccccatttcaaagacttgtgcgtcaacttgcttgccgacggtcttcaattgttcaatcgcagctggccgataaacatcggcggcaatcatcaatggccgtgctttttcgttttggattaaatattttgctaatttcccggccgtggttgttttcccggccccttgtaacccaaccatcataatgattgttggaatatgtggtgatttattcaacggcacagccgtttcacccatcatcttcgttaattcttcatcaacgatttttacaatttgttgtgcaggtgataagctatcaaggacttctgccccgatggcgcgttccttgacgactttaataaagtctttaaccactttaaagttaacgtcggcttctaataatgccagccgaatttcgcgcatcgcttgattgacgtctgtttcggtaatcttccctttacgccgaagcttactcaatgcgccttgtagtcgttctgttagcccttcaaatgccattttttatcagtcctttaagttaattattgttcggttaaattcagtaagtcagccaacaagcgcatcagttcttgatcgtctggatagtgcgcttgaatatacttttgtagcgtatctgcactggcattttgctgttcataattacggtaaagatgtagcttttcttcgtaaccctctaagattttttcagtccggcgaatgttgtcatagaccgcttgccgactaacattgtattcagcagcaatttcaccgagggaaaaatcatccccataatataaagagatataactatgttgttttgccgttaaaagtgcgccataaaattcgaacaacgaattcatgcgtgcgttttgtgcgagttccatttgacgcctcctagacttagtttgacctaagtattagagtaccgattttaacgggcttagtcaacgttttattgcgcgatttaactagaagtttgtgcattaattatcttttcactggtataaacgaaaaatcatgctaaaatagaactgtaagctttttcataacttaaattggaatttctatggaggttgtatgatggcagcaacaattatctattggggcgttatattcgcattaatcggttgggggatttggaacttaatcttctcagtcgtctatttaaagaacaaggaaaatggtaatctttggttcttcgccattttaaacatcttaaccttattattcgggctattattctggtgggtcttcaacaatcacgcttggcaagaatactggttggttaaagcaaccgcaaccaacagtctactaggtggcgttttaatcgcctatgtcgtcttaattatcgcccaagtgattttgggacgcgaaccaaaagccaaaacagcttaatgctaaaaaagaggatcgacacgtttgtcggtcctcttttctaatgttgtttagcgattaatcgcgcgatattttcactgacttgcgttaaattaacttcagtagcttcaattgcttttgctaatgacattgcgccaggtgttgtgcagaaaatactgtcaattcctaattcataaagcacatcaatccccgctccaatatatccggcaatcgcaatcaccgtcgcctgtggattaacttgtttaaccgctttggcgactccaattggcgtcttaccatattgtgtctgaaaatcgattccgccctccccagtgacgacgatatccgcatctcggaaaatctcagttaacccagtttgcgccacacgaccatctcaacaccaggttgaacctgcgcatccgtaaacgccaataaaccagcccctaagccaccagcagcacccgcacctggtatttgcgcaacagatttccctaaatcacgttcaatcaccgcagcaaagtgcgttaaattccgatcaagttgcgcgaccattgctggggttgctcctttttgtggaccaaacacggctgatgcgccattcgggccgacaagcggatttgtgacatctgatgcaatcacaaccttaacccttgatagtgccggtatcatatgcgtcgtatctatccgtgctaaacgcgcaagcgccccaccgcccagtggtaacacctgtccgtcaacatctaacaaacgcaccccaagtgcttgtgccattccagcaccgccatcattggtcgcactgccgcccaaaccaatcacaattgtttgcacaccttgtgctagtgcggctgccattaactgaccggtaccataagtcgttgttatcaacggattttgcgtttgcgcatcaacatactgaatcccgctagcagctgccatctcgatcaccgccgttttgccatcacccaagatgccatattgtgctgataccgtttggtccaatgcattttgcacttgtgcggttaagaaccggccattggtcgcatcgacaagcgctttgacagtcccttcgccgccatctgccattggcacttcgacataggacgcgcttggtaggcttttttcgaatcctttccgcattgcacgagccgcttcttttgcggtaacagcatttttaaatgaatctggtgctaacacaattttcatctgttaatctctctttcttctaaaaaaaggctagaacaaattatttgtcctagcctttttgctatttaatcgcttgactgacgtctgtatcagttgttttttgtggcccatcaccgacaataatatccttgaataagccataaacaaagcggtttggatcaaagagttgtaagtcgttcatttgttcacctagaccaaccatcttcactggtaagtgtaattctgtgcgaacggctaaaacaatcccacccttggccgaaccatctagcttggttaagacaatcccagtcacatcggttgtttgcttgaattgtttagcttggactaaagcattttgtccggttgttgcatctaagaccaacaatacttcttgcggtgcagctggtacttcacgcgtgatgatgcgtttcactttttccaattccttcatcaagttgacgttgttttgcaaacgaccggccgtatcaactaataaaatatcgaattgttcttctttagcgcgcttaaccgcgtcatagacaactgacgctggatcactccctgctgcactagcaaccacggggacattatcccggcgaccccattcttgtaattgttcgatggcgcccgctctaaaggtatcaccagccgctaataagaccttcttacccgctttttctaattggtgggcaaacttcccgattgaggttgttttccctgcaccattgacaccaacgaataagaagacagttaattcgccttgtggagcgaaatgcaattgattatcttctgcttggccttcttgaccgtacaaatcaactagcttttcaacaatcgcttgtgaaaccgcttctggtttcttaacgttacgcaacttcacttcgtcacgtaattcgtcagcaatcttcatcgctgtttcgtagccaacatcggcttcaattaacatttcttcaacatcatcgaaaaaggcttcatcaacacttctaaagttagcgaacaacgcatttaagcgttgcccaaatgtgagccgggatttttctaatccatcatcatacttcttcgtttcagcagcttgcatgtcgccagttactgcttctgtttccggcacttcttcaatcgcatcggattcttcagttactgccgacgcttcaactggttctggttctggttctggttctggttctggttctggttctggttctggttctggttctggttctggttctggttctggttctggttctggttctggttctggttctgagtttacgggtgccgccgttggtgtgtcaagcggtgataccgtttctgaatcatcttcagttgctaaactggctggttcatcggtttcagttttctcagctgccgcagtttctgcaggggtttgcgattcaaccggcgtagcgtctgattcaaccggtgtttccggtatcgcttggtcttgttcaaccggtgtttctttttctggttcggctgagaatgcttttttaatacgatcaaataatcccatggttttcctcctaggctgttgcgtgttcttctaatgaaacggaaacaatcttcgagattccagattccgccattgtcaccccgtataagcgattggcttgggtcatcgtcccttttctgtgggtaatcacgatgaattgtgtatcactctcataacgtttcatgaaacgaccgaaacgatcaacgttggcttcgtccaacgaagcttcgacttcgtccaaaatacaaaacggcactgggcgtacttttaagatggcaaacaataacgtaatcgccgtcaatgcgcgttcaccaccagataaaagactcaagcgttgtagtttcttaccaggtggttgcgcaataatgtcaatcccactcgttaatagtgcgcttggatccgtaaacgttaaactggcatggccgccaccaaacatgatcgggaagatggtttcaaaagcagcggcagtttgttcaaacgtttccttaaaccgcttttcaacttccgtatccatttcagccatcgatgctaataattggcgcttagcgtccatcaagtcggcatcttgttgcatcaagaaatcgtaacgttctttaacatgttgataatcatcaatggccgccaagttgaccgttcctaaatcagctaagccgagtttcaataatttcaacttagaccgcaattgatcgtcggttaagtctgatgcggccaaagcggccttggcggcttcgtaagtcaattggtaatcttcgctcaatgtatttaagcgttgatcaatgttaattttaacccggttgagcccgacagcattttgttcttgctcagctaaactatttttttgtaattggtagacgcgtgtggcattggcttgaagcgtttgttgttccgccttcagcgtttctttttgcgcgcgttcagtggctaacttcgcttggactttctcaatcaaagcattggttgcctttagcagtgctcgtcgttctttttgactcgaagcgtcttcttgatccgcttgttttagcgcagctagtttatcctgactggccttcaactgggctgccaggtcgttgctattgcgagtagcaaccgttaatttctcctgaacattcttttgttcagcttgagcgacagccaacttggtttcgagggctgtttgttgttgcgcaatttgtttttgactctcatcaaaatgttgtaattgctcattagctgtttcgagatctgcttgcagctgtgcaatcgacgcaacaatttcagcttcggctgccactaattctgcctggcgttttaaatctgcctcataagcttgttgttgttgttgcacttgataatcggttgcttgttgttgccgttcaaactgactcaaacgttcgtcagtcaaggctaacgtattttgggcagcttgatattgattcttagcggtttccaatgccgcttgtttcgtatttaattctgcttggcgtgccgttaattgagcttttgcggcttggacactggcttgcttttgatccaaagcgacctgcatcttggcaatttgaccttctaaatcagtcaaggtttgcttacgcgcaagtagcccaccattgttttgtcggttattatggcccccagtcatcgaaccacccgggcttaaaatatcccctgctaacgtaatgattcggtaacgatgccccgtcaattgactcaatttaatcgccggctccaactcagtcgcgacaatcaaattgcccatcaaatggttcatcaccggtcgcacttgttcatcaaactgcacaagctcactggcaattccgataaatccaggctgctgttgtaattggtgaactaagctacttggtagtaaacgtggtttgacaacgttattgggtaagaaagttgcccgcccaatccgattggttttcaaatactcaatcgcttgtttggccgtctgttcatcccgtgtcacaacttgttgtagctgtgcgcctaatgctaattcaatcgcttgttgatactcactgggcacttgcatcaattccgctacagcccctaataaaccagggaactgttgtttttgcttcaagacagccttaaccccttgataaaagccggcgtagtcatcatttaattccgcaagactggcttgttttgctttcgctttttgtaaaataccagacgcttggaaccaactattttgttgattttggtaagccgcttggtccgtgttaatttgcgtttgtaattcggccaactcattggacaacgtttcgtattgcgctttgagtgtttcaagttgggctttttgggccgcttgttctgcctttttttgtgccaattgcgtcgatgtctcatcgactgcactatcttgccgtgcaagttgcgttttagtttgtaacaagttcttttctaaatattgttgttcattatgattggtcgtttgggcttgcatctgatcgatgtattcttgacgaatttgttcaatcttcgctttcagttccgcttcactaccagacgcttggcgtttaagggtggttaactccgtcttcaacgcccttaatgccgtcaccttttcttcataacttgcctttaattcagattgattggcttgttccgccgttaattgctgttttaatgtgtcgatctgttcgactaaactttggcggttcgcatccgtataattagcgcgctcttttgaaacgttctcttggcctaatagattttcagctaagcgagacttttctaacaacgtctgattatcttgttctatttgttgttccaactgggctaaggttgcctgattctcggtttgggcagccgtcgtcttagcgatgtccgcttcaatctcttgcaacgcttgcgcaagggtttgcgccttttctttgtacgtcttttgatcagccactaattgatcaatttcaatcaccaataattgttggtgcaacgtatcatattgcgctttttgatccaagtaatcctgcgcaatactgctttgttccttcaacggttcaacttgtccccgtagttcatgaagaatgtcggtgacccgactcaaattttcatctgtttgatctaattcagattgagcctttttcttttgttgtttatatttcaaaacaccggccgcttcttcaataatattccgccgatcttctggtttactgttgaaaattgcttcaacccgaccttgcgaaataatcgaaaaagattctcgcccaaggccagaatccataaataaattaacgatgtcttttaaccgacaactcttttgattcaaataaaactcactatcgccatttctaaataaacgccgcgtaatcgtgacgttggcttgttcttgtttcaaatattgatcgctgttatcaaaagccagcgtcacttctgccttattcatctgtggtcgaatatcagtcccggcaaaaatgatgtcgggcatcttttcgccccgtaagctcttggctgattgttcgcccatcgcccaccgaattgcttctgtgacgttacttttaccgctcccgtttggtccaacgatgcccgttaaaccttctgaaaaattgatttctgttttatcagcaaatgatttaaaccctgataaaaccaatgactttaactgcatgcactaaactccctacacacggcggttggtttcaactgtcgtttgcttctttctttatttcagtttggaaagcgccactttagcagctgcttgttcggctgcttttttgttccggccaacacctgaacctaagacgcgatcgcccatcatcacatccacctcaaattgacgggcatgtgatggtcccacttctgccaataacttatattcaatctcaacttcaccatcttgttgcaagaactcttgcagattggtcttataatccgtttggtctgaaaattcaccggcttcaatcttgggaaagacaacttgttcgatgaatttaacaactgcgccacgcccttgatctaagaacaaagcgccgttaaaagcttcaaataaatcttccaaaagtgttgctcgtgcccgcgcaccgtttttttcttcccctttaccaaggcgaatgtatcgatcaaagtgcgcttctttggcaaaactactgaaactcttcgtgcagacgattgccgcccgtaagcgtgtcagtttaccttctggccagtccggatattttttatataagtattccgaaaccgtaatttccatcaccgcgtcacccaagaattcgagccgttcgttatcacgaagacccaactcccggtgttcattgacgtatgacgaatgtgtaaaggcttcgtccaatagtgctaaattctgaaattcaatgccgtagcgggctcgaagctcgctcactagtgctgcatccaaaattaaattaccccatttcaactgtttaatctttcactattataccgtttatacgcttaaaaaaacagcgtcgttcctagcaaaccgtttcttttattaatcactaaaaaacgcctgttttgaagtattcattgtaacacgcaaacgaatatttcaaaacaggcgttgctttatgcagatggcgttgtcattgctgctaaagcggtttgataactcgctagttcagcttcagttgcatagacatagtgttcatcggccacttcgcgcaattgacgaccttcattatctgcctcaattgaactatcataagcaattcgccgacgttgccgctcgacctttggatcaggtaacggcacagcagacaatagactttgcgtatatggatgcaatggtcgatcataaatgtcatcggctgatgccaattccataattttaccgttatgcatcaccgcaatccgatcactaatgtatttcaccatcgataaatcatgtgcgatgaataaatacgtcaagttttgctgttcttgaatttctttcatcaagttaaccacttgtgcttgaatcgatacgtcaagcgccgaaatcggttcatccgcaatgataaatttaggttttaccgcaagcgcgcgggcaatcccaatacgttggcgttgcccaccggagaattcatatggataacgcgttgcatggtctttattcaaaccaactaattccaaaagctcgttgacgcgtgcatcacattctgcatcatttttaaccaaatgatggatatgcaagccctcagcgatgatatctttgactttcatccgtggattcaatgatgcgtagggatcttggaaaatcatctgaatctctttccggaacgccttcatttcacgactatgatttttaatcttactaatgtcacggccatcgaatagaatttcaccatctgtcgggttgtatagccggatgatactccgcccagttgtactcttcccagaaccagattcacccaccaagccaaacgtttcgccttcatagatttcaaatgagacatcatcaatggctttgacttcggatttttttccttggctaaaatattgctttaaatgtttaaccgacactaatacttttttatccttgtccatcaattgtccctactttctcttgaacttgtgtcgcctggtacttagccatcattgcacggacggctgctggtggttccacagctggtgcatctggatgcaacaaccaagttgccgcaaaatgcgttttcgacacttggaaaaatggcggttcctgttccacatcaatttgtaaagcatatggattacgcggtgcgaaggcatccccttttggtggatccaacaagtctggtggggtccctggaatggcttcaagacggccagaagtatcaagtgttggcattgagttcaataagccccacgtatatggatgcttgggttgataaaaaatttcatcaaccaacccatattcgataatcttaccagcatacattaccgctacgcgatcggcaatccctgccacaacacctaaatcatgcgtaatgaaaataattgaggtttcaatcttgcgttgcaattccttcatcaaatcgataatttgtgcttgcactgtcacatcaagcgcggttgtcggttcgtcggcaatcaggatttgtggataatcaacaatcgcaatcgcaatcacgattcgttgccgttgcccaccagaaaattgatgcggataatctttcatccgtgctttggcattcggaatacccaccaactctaaaacactctgtgcacgtttcattgcttcttccttattcattgttttatgaatcaacaagggttcagcaacttgtttaccaatcggcatcgttggatccaatgacgtcatcggatcttggaaaatcatggaaatatcgctaccacgtaaggcattcatttcctgttctggtttttgtaagagatcttcattgtgatacttgattgtaccacccttaatttgagcattgcccgctaacaagcccataatactacggaccgttaccgacttacctgaacctgattcaccaacaatcgctagtgtttcgccttttttcaagttgaaactgacatcgcgaatagcatggacgttccctgcgtaggttttaaaatcgatacttaaatgtttaacttctaaaatatttgccatttgacgacctccaatgatgaaaccgcgtggaaacggccttgtattgacatgctttttgaaactgactctgcttctaaacgtgctttcattaactgctttttatggttagctacgtctaacaaataatcaacaagttgattattcgccagactatgctaatccgcgaaagataaccgcctacttacacacgctatgattttggatcgaatgcgtctcttaatccgtctgctagtaagttgacggcaatcatgatcacacagaggactgctgctggataccacatttgatatggcaagaaacggaaagctttttgcccatctgataataacgtccctaatgaagcattcggcgctggaatcccaatcccgataaagctcaagaatgcttcgaagaaaatcgcactcggaattgtaaacatcgtttgaataataatcgttgaggataaattcggaatcagatgtttccaagcaattttggtggaactttcacccaacgtccgtgcggcgagcacgaattcttgttccttaagttggaacgtttgagcccgaatcaaccgggccattgtaatccaaccggtaaacccaatcgcgatgacgattgacaataaacctggacggagtaccaacatcatcaagacaaccacaattaagtttggaattgatgaaatgatttcagttacccgctgcatgaacatatccaaacggccaccacgccatccggaaacaatcccatatggaattccgattaataaatcgaccaatgtcgctagaatcccaattaataaggataagcgtgtcccgtataaaattcgtgataataaatcacgaccgagataatccgtccctaagataaacgttttgcctttgggaacgcccgcttgttgatatttatcaactttaacaccggaaacgtccatcttaccggtaaaaccagggatattccccgatccaattttagggggtaggttagcgtacgccacattttgtgtatttggactttgtggtgcaatcactggtgccaataaagcagccaacatcacaatcaagaggacaactaatgaaaccaccgcgactttattttgctttaagcgccgaatggcatcttgcgtaaacgtcaatgatggtgcactaattttttcttgtgcttcatgcgtgtcttgtgtaaggggcttgaatgagcccgctggtattttaatatccgccatttagtgcgccccctgactgtcacttaatcgaattcgtggatcaataatcccgtaaagaatatcgacgactagaataatcactgttaataagaatgaatagaaaatggtcaagcccatgattgttggataatcattcgtcataattgacttcacaaattgttccccaatcccgggaatcgagaaaatattttcaacaactagtgacccagtcatcaagttgactgccatcggcccgataatcgtaacaaccggaatcattgaatttcgtaaggcatgctttgccactgtttgccattttgaattgcctttggctttagcaagttcgatgtaatcactgtttaaaacatcgaccatttcagtccgcatgaaccgagccgtattcgccaatggtgcaaccgctagtgctaatgttggtaagacactagatgaccagccgtcccataacgcaattgggaatagttgtaatttaaaggcaaggaaaaattggagtaagaccgccaacacaaagttcggaattgaaatcccaacgattgaaaagaacgttgcaacgccatcgacccatgtattcttgcgaatggccgccactgcccctagtaaaatacccagtaatgagccgacaatcatcgcttgtgccccgatttgtaatgaaggtcctaaacgcgtcatgattaggctcaagacgggctgattgttgaactggaaggatgtgccaaaatcaccatgcaacaagccacctagatagatgaaatattgctgaattaatggtttgttcaaaccgtactgttcattcatgatccgtaattgatcagcactcattttttcctgattcgtatatggcgtccctggcatcaacttcatcatgaagaaggtcacagaagcgacaatgaatagggttagcactaaatagaatattcgtttaataaggtatttactcataagttcgctcctaacaaaaacgggcttcattgtttttcaacgctgaagcccatctttataaagtcagtttatttttttaaataaagtgagacattattgtagcttcctgaagggccgtagtctaaacctttaaggcttgggttagttaagtacgccacacctgattgatacagtggaatgacacctgactctgtattcataatatcttgtgctttaacaaggttttgccatcttgctttaggatcattggcgttgtcacctttacttgccttgatctgtgcatcgtattcggcattgctccaatggccatcattgttatcgccgcctgttacaaacaagtctaagaatgtgattggatctgggaaatcagcgttccaagcactaaccaccatgtcgaaatcaccgttcgttgaacgtgttaaacgagtcttaaatggcacgttcgctaatgtgactttcaaacctggtaagttcttttgtaaagtattttgcaaatattcggattgtttcttggcagtatccgtatcatcgccaagtaatgtgtaattgaatgttttgcctgtttgcccagtttcagcaaggccttcgttccaaagttttgttgcttctttagggttgtaacttgcatttttcttacccgctgcgtctaaatcatcaacaaaatccttcttagttgttgggtcaaatgacatattctttggtgtcacagaagcaattggacttgaaccatcacctagaacctgtgcgactaattctttacgattaattgtcattgaaattgctcggcgaatcttcgcatttttaaagattggattcttttcttggttgacttgcatgtagaatgttgctgatttttgtaaggttgagtaatgtggatcgtttttcatttgtttagctgtgtcaccactgatcgccgtccgatctaatttattactttggaagaggtttaaagctgttgatggatctttaaccacttgatacttcaacgtcttaaccttaactgctttcgtattccagtaattggtgtttttaacttctttccatgagctatctgggccattccaattttctaatttataagggccgttgaaaactaatgttttagaatttgtcccgtaactcttgccagctttcttgactgcttctggatattgggggaagaatgttgaactggtcatcaattgactgaagtatggaattggtttttcaagggtgacttctaaggtgtgtttatccttagcgactacacccaatgaattaaccggttccttaccagtcgtgatgtctgctgcatttttaatgccttcatagatataagcatattgtgaaccgacctttggatcaacgactctgcgccaagcataaacgaaatcttctgccgtgaccggttgaccgttgctccacttcgcgtcttttcttaatgggaatgtatatgttaaaccgttattagttggtttgactactttagtcgcaatcgccggtttaatttctttaccctcgtagcggtaaagaccttccatcgtatcggttaaagcctgtgcaccgatcacatccgtatttaacgctgaatccattgtcgaaatgacatccccagttgcaaaactggctgtgtcagtcttaacggcttccttgctacctgagttaccacaagctgctaataataatgtgaccgccactgttgttatacctaataccaaactcttttctcgtttcatatggacactcccttcagttattaaagataataatacatgattaaaaatgaaaagtaaataataaagattaaaatattctaatttattttcattgatacagagccattataagaatcattctaatattataacgcatccgcaaatgattattatgtgaataatctcattttcacaaactgtttaaaaaaataataagttgggagaaatcagcatgattcaaaccgtaacagaacagaacatcgcaagctttgttcaaacacaaccgttagtgattttagacttttgggcggattggtgtgcaccttgtcggattatgacaccgatgattactgaattacatgaacaattagctgatcagtttggcttaggaaccgttgatgtagaggatcaagcagcgttagctgaacaatatgcgattcaatccgttccaaccctattaatcttcaaaaatggtcaggcgacagaaaaggtaactggcgcttttccaaaagagaagttaaaaagatacttagataagaaaatcgctgaaatgtaatcagcgcattaatagtagcccgcaactttcattggagagttgcgggtcttttttgataagtagaaataaaataacccccttagctattgtctaagggggagatgattattgacgaaccatgtggataacacgttgataaaggattaatgcgccaatctcacaaagtaaaatcaaaacagctaatggaagataggtataactgcccatcacgccaactaatggggaaagaaaaatgccgaaaacatacatgccaagtccaagcactgaagaagcaatccctgcatgttgtccttggcgttgtaaggccagtgaggtgacaacggcattaattagaccaagtgttgcgaccactaggaataaaccaattaaagctaaccagagacgattagagccaaagccactaattaagacgcagatggcaccgattaaaccaccaattaagccgatttttaattgttgtaattcatcaaaccaatggattaaaatggtggacatttcagccattaagataatcccaatcccattgattccgtagattagactgaaagttgatttagaaagactaaagacattttgaagcatgaaactggaacctgaaatataacagaacattgccccataaacgaggccttgaattaaaacaaataggatgaatgggcgatctttaaaaatggcttgaataccaaggcgcgattgttgtgccgattgcgcgcttgtggatactgtgtgtgtttctttgaatcccaaaatgatgcctaacaatagaagaaggccaacaatccctaaaaagccgaaaatgccttcccaagaggtgaaacggagcaaagcacttcctattaatggtgaaatgatggggaagataccgttgattgccatgagtaaggcaatgaattttgtcaattgtttaccgtcaaataaatctttagcgactgctcgagtaatgacctgtcctgcagagctcgctaacccttgaataaaccgtaaaaggaagaatagccaaatattgtgggtgactaacgataatagacacgctgtaaaagcaagggcggttccgattacgagtggctttttacggccaacacgatcgctccaggcacccatgaagatggggccaatcgcaagtccagccaaacacatggttagactcagttgaatcatggaagcagatgaatgaaaatcagcttccataatcggaaatgctggtagatacatatccactagtaggggtccataagcactcagtgaaccaagtaaaacagataaccatagtgttcttttttttgttaaaaccatgttaataaaccctcctaaataaaaaagtgtaaaaaaatagcccgttgaaaacgtagctagcgccgaacgaatttaattaattactattcatgttgcttcttagttacactaacataagaagtcgggtttgtggcgatatatgagcaatttttaatatgtaaatggtttctatttcagtttaaacaagttatgatggagataatgaaaaaagttgtcgaatgaggttttgccatgaaaattgcccaaaaaaataaaatattagaaacctgcctaattgcgggacggattatgattgaaagtggttctgaaatgtaccgggttgaagatacaatgaaccggattgcttataatgcaggcattcaaaagagtgttgtgtttacgacaccgaccggtttatttatcggaattgaaaatcaaccttatgtgcaactaggcgctgttgcggtgcggacgattaaccttggaaaagttgaaaatgtgaatactgcttcacggcaatttgcgactaaggaaattacgttggatcagttaatgttacggttaaaacaaattgatcaggatacagctcattttccgttgtggttacaaattacagctgcagcagtcatttcagcgtttttgatgattattttttctggtgaatatgattggttagacatcataccgtcagcggtagccggtgctttaggctatgccgcctttgcggcggtcaatcgggtcacaacgattcgctttatcggtgaatttttaagtgcgacagtgattgggatagtcgcctatctattaactaggtggcacttaggagtcgatatcgataatattatcattggggctgtaatgccattggtacctggtgtagcgattaccaattcgattcgagatttgctagcagggcatttattatctggtatggcacgtgggatggaggccatcctgagtgcctttgcaattggaacggggattgcgctcgtatttagattctttatgtaaagagaggttcatcagatgccatattgggttcagtttattattcaagcgttatttagttatatttcaacggttgcgtttggaatttgtattaatttaccaagacgcgcattattatggtgtggctttgccggtatggcagggtggcaggtctattggatgctctttaactttggtagcgggcggatgcttgctaatttgttgggtgcgttagctgttgggatttgtggcaatattatggcccgttataagcggatgccggtgattatctttaatattccagggttagtgcccttagtgcccggcggaactgcgtatcgtgcgattcgaaacctcgtgctaggcaacttaaatgaagcttcgacacaaggtgttgcagtgatcatgattgctggtgcgattgccgttggctttatgttagcgcaaattttagccgatataacacgcaaacgagcgattacgccgaaatgggtatcgcgtcactaaaaagtatgctataataaggttatgcgatgagtcgagtaagtctcggtaggcaactattctgcgaaggcagctaggagacccaaagatacaggataccacggttattcatttaaccacttgccgtattgcaagggtgttttcgcccgctgtgttgtggagcacaaggtgtttattcttcggaatactgtaaaaaaagccccttccgtcaggaaggggcttttttttgtgcgttcattttcttgcatgacagcgttactgatggtgcgatggtcgactaattcaccaatccgttttagatgtttgagatgtgcatcgtagtgttccgaaaaaacgagcgcgtataaaacatttaataggaagatgatggaggtattaatggtaaagttgccgattttcgagtagagtttttcgcgggttgtaatcggtaaaaagcaagtgcattcttgcgaaagtcgattttcaccgatactggtaatcgcaatcgtcgggatgttgcgggcgcgtaaaatagtgttaagtgctagtaagttgggattctcgccagaataggaaattaaaatcgcacaagcatccggactaagattataggcatcgtagttttcctcgccacgaaccgcagatagcgtaacgtttttttggatacgattcattttgagggcaaaatcttgcgcgatgagtaagtttgagttttgggagaagatttgaatatgatttgccttgaggagcaatgatttagcttgactcagatggtcgtggtcgagtaaaaagaagatatcatcaatcgtcattttgtccaagaccgccattttcttacaaatagtcatcaaactatccgtactcgaaaagggcagattgggatcgatacgcgtaaaatgtttattgaggtagcgccactcttctagatagtgtttcttaaaagatttccaaccgtcaaaatggagttttttggcaatgcggaccagagtggacggttgcgtataggtttgagcagcaatttcttggatggaaagctgatcgagtgcttctggagccgttaacaagtaatccacaaccacggtttcagcgggggaaaacgcgaatgtctctagtttttctttaattaacatgtaaccgcctccttttacaaaagattagcgatatttgtaaaataagtcaatcgataccctagtgatttgtaaattaaattcgcgtttaggccattaatatcggcagtttatgcgaactcacttttaaacgagggcatagaggtggggtttgcggtttgcgttaggtatgcttaatttgtaaacaaatcaaaggaggcattcagatgacacggaaagtaaaaattgcaacgattggtggcggtagtagttacacgccagaattgatggaggggtttattaagcgctatgcggaattaccaattggtgaaatctggttagtagatgttgaagcaggcgattgtcggaaaaatggcgcaacgaatgtgggatgcgtccccgtatgatgttcagattcatacgaccttgaatcgtgaagaagcgcttaaagacgccgattttgtgaccacgcaatttcgtgtcggccaactggatgcacgggtgaaggacgaacgcattccattttcatacggtctattggggcaagaaactaatggcgctggtgggatgtttaaagcatttcgaaccattcccgttattttagaaattgttgcagatatgaagcgcctctgtcctgacgcatggttaattaattttactaacccaagtggcatggttaccgaggcagttttaagatacggttaatgggaaaaggtgattgtttgtgtaatgtgccggtcgccgctaagatgggagaggctgaaacgttaggtgtgccacagacggatttaatctataaatttgcaggggttaatcactttcactggcataaagtagccgataaaaaaggtcatgatttaacgccgcaattgattgataaattatatgaagaaaatagcgggttaccgaaaaatatttttgatgttcctttctatcgggaacagttacagcaaatgaacatgatcccgtgtggctatcatcgttattactatcgtgctgaagaaatgttaaagcatggtttaacagaatatgcgactgaaggtacgcatgcgcagcaggtgaaagtcattgaatacgaattgttcgagttgtataaagaccctgatttagattacaaacctaaacaacttgaacaacgtgggggtgcttattattcagatgcagcctgtgaaacgattgcgtcgatctatgcgaataagaatacagaaattgtggtttcaacgcgaaataacggggcagtccctgatttgccagcggattgtgcggttgaagtgacggcctatgttggtggggctggtgcgcggaatgttgcgtttggaccattgccaacagcagaacgtggttggttacagatgatgaaatcaatggaattgttaaccattgaagctgcgataacgggtgattatggcacagctttacaagcctttattagccatccattggtgccatccggtgaaaccgcaacgcgcgtcatgcatgaactactgattgcgcataaggcttacttacctcagtttgcagacactattgcacggttggaaaaagaaggcataacgattaaggatgaagtggttcgaaagatgtagtgatcatccaaaaaaggattggcgagcagcgaatcctttttttaatcccttaaaaggcgctataatctgtaaagattgatagaatggtagcaaggggcggttagtaaatgtttgaacttgaaaaaatccagcagttgaatacattggagctatcagttttaaagtatgttttaaatcatcgcgcacaggtcgaaaaaatgacgattcgtcagttggcgacccgagcgcatgtatcgacgtcaacaatctcgcggttttgtgagaagctagggtcgaggggttttcggaattcaagtatatgctaaagcaagagcggttggcgcaaaaaaagacatcgatgcctgaatatgatgtcatgttgccaattaccgagtttttggataaaacgaataacgaaacgttcagacagcttttatcacaagcaacggcattaattttagaggtacaagctgtctttttctttgggatcggcactagtggtgccctggctcagtatggttcgcgttatcttgccaacgctggtattttctcgctgagcatcaatgatccatttacaccggtggggatgcgagaaacagtcgtggcggataccttattagtggtgctctcggtgtcgggggaaacaactgaaatgctggcacaagttgagcaatatcaagcaggaaaaggcaaagtattggcaattaccaacagtacgcattcgactttagcgcggttagcggacgttgtgattccgtattatatgcctgaagaaaagaatggttccttgaataatacgacgcagataccggtggtttatattctagagttgctagcacatcgggttgcttgcgttcagtaagtgttgtttgaaacatgttatttttaagaaacaaataccaatcagtggtgcatgtgtttatcaccgttaaaggactagtcgcccagatggcaaagcgctatactgcaattatggaagcgcattctgaggcggtgatgttgatcaatcgccgtgattaaatagcgaagggaagttaaacacatgaatacttggattaatactaaattaatgccacctattatgaagtttgttgcgacgcggccgattacagcgttgaaaaatgggatgctatacgtgatgccatttacaatcgttggatcgattttcttaattttagccaacttgcctgttaagagttgggccgattggatggtttcaactggtttgaccccatattggaacgttgcctataacgcatcgtttgcaattatggcgttaatcgccgttgcggggattgcttattcttgggttcaggatgaaggttttgatccgtttccagcctcattacttgctattgtttgtttctttcttattagtgacgcgcccaagcactgccattgtttcggcatccggtaagattgttgtctctgttaaaatgatgagtcaacaaaccgggtttattgatcggacttggcttggtggacaagggatgattactgccattattgtcggtttactagtcggttggatttactcagctttcttaaaacatgatattcggattaaattaccagaacaagtgcctgcgaacgttgcaggttcctttaccgctttgattccagctgctgttttaattagtggctcactcttggtttatatcttcttcgacaaggttgcaaactcaaccttaacagaatcaatttacaataccattcaagcaccacttcaaggaattaccgattcatttggtggcatgttagccatttctttcttagtaccattcttgtggttcttcggggtgcatggttcaacaattgttggtgggattatggggcctttattgcaagccaactcactggctaaccaaaaaatcttgggttcaggcaaagcattaacgttagctaacggtggttacattgtgacgcaacaattacttgatcaatttatgacagttaccggtgctgggatgacaattgggattgttgtttacatggcattctttgccaaatcagcacaattcaaaaatttagggaaattatcattagcaccagcagtctttaatattaatgaaccgattttatttgctacaccaatcgtgatgaacccgattatgatggtgccattcttcgtgacaccaatgctatcagcaatcttaacgtggactgcgattcgggtcggtttaatcccaatgttccccggaacgttggtaccatggacgacaccaccaatcatttctgggttattagtgggtggttggaagactgcattgtggcaagccttaatgttattaatgacgttctttacgtacttaccatttattcggaaacaagatcacttgaactatgcttcagaacaaggtgcaacaactaaatagggggaaaggtcaacatgggacaacttagaaaagattttttatggggcggcgcagtggctgctcatcaattggaaggcgcttggcaagcggatggcaaagggattagtgttgatgtgatgactgccggggatgttaatcatcaacgggggattacagatggtgtacaaccggggcacaattatccgaaccacgaagtcattgatttctatcatcgttatccagaagatattaagttatttgccgaaatggggttcaagagctttagaacatccattgcatggacgcggattctttcgaatggggatgaagcacaaccccaacgaagccggccttaaattctatgatgacctatttgacgaatgtctcaaatatcatattcaaccagttgtaacgctcttgcattttgaaatgccatatcacttggtcacggaatacggtggttggcgtaatcgcaaagtcatcgactttttcttgaactttgctgaaacggtcttcaaacggtatcgtaataaagtgaagtactggatgacgttcaatgaaattaataatcaagccaattaccacagccagtttgccttatttacaaattctgggttacagattcaacctggtgaagatgctgaaaaagtgatgtatcaagccgcccactacgaattagtcgcgagtgcaaaagctgtacaaattggcaagcaaatcaatcctgatttcgaaatcggctgcatgattgcgatgtgtcccatctatccactgacagctaaaccagaggatgtgctcaaggcagaacgcgcaatgcaaacccgttattggtttgctgacgtacactgtcatgggcgctacccagaatggctcttacaatatcaaaagaaccaacactacgatttggacattaccgcagatgatttgaaagaattggctgcagggacagttgattacatcggcttcagttactacatgtcatttgcaaccaaggacaaaggtgaaacaacacttcattatgatgaagaacacgatttagtgcctaatccatatgtcaaggcatcggaatggggctggcaagttgatccagttggcctacgttatgtaatgaactggttcaatgatcactatcacttaccagaatttatcgtggaaaatgggtttggtgctgttgatcacgttgaagcagacggccaaattcacgatccttatcggattgattatttacgcgaccacattgttcagatgaaaaaagccgtggaagatgacggtgttgatttgatgggctatacgccatggggctgtatcgatttagtttcagcaggcaccggacaaatgtcgaagcggtatgggtttatctatgttgataaaaatgacgacggaacggggacgttagctcgttctaagaaggactctttctattggttccaaaaggtaatcgccaccaatggggatgacctagcataatcatgaatagcgacgcaggcaaattgattttgtctgcgcctttttttgttgaaagaagcccatgcattattaataacccatttttctgaaataaaactgttattttatcgtgagttaacattaggcaattaccattatgaaataaattatgagaattagggcttatctaatgcaaaaataatcactatcgtttacaataagtaagtattaaaaatggaatggggtaaagaaatgacaattacatatgtcgtcatcaacatcgtgatcatgctcatcatgttatttgttttaaacaagatggcccggattcacgttaagtttagtcgccgcgttttcacggcattgggggtcgggattttattcggcgcactcttacagattatcttcaaagcagattcaacggttgtcaaacaaacagctgattgggtcggcattgtcggcaacggttatgtctcgttcttaaagatgatcgttatgccgttagtcatggtttcgattattcaagccattacgaacttggaatcatctaagggcttagggaagatggccggcatggtcattggaatcttagtctttacaaccttaatcgcagccacagttggttcagtgacagcggatgttttcggcttaaatgcgagtgatattcaatcaggccaagtcgaaaaggcgcgctcgaaagaattacaaacgaagctaggcgatgtacaggaacaaactgttcctgaaaaaatcgttagcttcattcctgaaaatccattcatggatatgacgggttcacgacctacatcaacattagctgttgtgattttctcagctttcttaggagtggcagcattacaattacggcgtaaaaagccggaacaagcagaaatgtttaataaaatcgttaacgccttgtacacggttatcatgcgcatggtaactttaattttacggatgacaccttatggggtgttagccttaatgacaacgaccgtagcacaaactaatgttaaaggaattctcagtctaggtgagttcgtgattgcctcttacgtggcattaatcatcatgttcttgattcacttcctattaatcacgttcactgggttaaatccaatcaactacattaaaaaagtgattccaacgttaatttttgcgtttacgtcacggacgagtgcgggttcaattccaatgaacattgaaacccaaacgaaacgtttaggggttgaagatgggattgctaacttatcggcttcatttggggcttcaatcggtcaaaacggctgtgcgggtgtttatccagcaatgttagctgtgatgattgcaccaactgttgggattaatccttggagcatcggtttcttggttaaattaatcttgattgttgcaatcagttcctttggggttgctggtgtcggtggtggcgcaacatttgccgctttaatcgtgctttcttcaatgaacttaccagtcgggttagccggactattaatctcagttgaaccattaatcgatatgggtcggacagccttgaacgttgatggctcaatgactgccggggttttaacggctcacttattaggtaaactggataagaacaagtttaatgatatgagtttgacggaagattcagacgaaatggcttaatttcaaaaaaatggagggtttagtgatgcgaacgattattatcggtgccacagctgccggaacaagtgcagctgcgaaagcaaaaagaacgaatccagatttagacattacgttatacgaaaaacgggactatgtgtcctttggggcttgtggcttaccttattttgttggcgagcactttgaagatcccaaccaaatgattgcccggacacctgaaaaatttgctcaacaaggtattgatattgcgcttgaacacgaagtactatcagttgactttgatgcgcaaacaatcgtggttcgggatttgaaaaccaatcaagatcgcacagaatcttatgatcaattaatgttagcaacgggagccacagctgtgatgccaccgattaaaaatgttgatctaaaaaacgtctatcatctacggacgatggcagatggacaagccttacgtgaattaggacaagacccaaaggttcaatctgtaacggtgattggtgcgggctttatcgggttagaaattgccgaagagttccatcaattagggaagcaagtccgggtcattcaactagaagaccgaattttaccactggcttttgatccagaactaacggacatgttcgcggatgacttatgtgataacggcattgaattacacttatcagaagctgttcaagccttagaaggaactgttcaggtgactggcattgtgactgataaggggcagtatgcgacagacttagtgattgtagcagctgggattcggcctaatacgcaattcatcacggatgatcgattgaagaagttgccaaatggtgcgattattgtcgatcaagcagggcggacatcgattgaaaatgtctatgccgctggcgataatgcaacggtcattaacagcgtgacgaaccaaccgatgtattcagcacttgccactggtgccaataaattaggccgaattgtcggcacgaatttaggcgggcaagccgctcaattaccagggatgttgaattcagccggtgtgaaattaatcacgctagaagcgggccgaacaggtttgactgaaaaagaagcggcagaggctggtattgatttcagtactgttttaatccacgacaagaaccaaacgaattattatccaggccaatcagatttaacgattaaattgatttacaccaaagcagagcatatcttaattggtggccaggtggttggtcaaaaagacgcagtgttgcgcgttgatgtactcgcaactgcgatccaagcgaagatgacaactgaacaactcgggttactcgaccttgtttatgcaccaccgtttgcaagaacgtgggatgcactgaatgtggccggcaatgttgcccattaattaaaaaaaagtgacaccgcacaaaccgtgtagtggcgctttttttgttgcatgcttaaacagttgttcatagtgtttacttgaatgtttactcgggtctgtgctaaaattgcatttagaaattaaatttttgcaaagttagttatgaattaattacgatgattaagaaaacacaaataaaaaatttatcgacaggagacagtttaatgaacaacacaaagagtttgattgcattgagttctggaattttaggggcagctgggatcggtttattgagtgcagggcaagtacaagcagcaacgacagcaaccgtcaactacgcagatggtgcaacaactgtttggacaagtccaacaactggtcaaactgctaaacgatacatctttaagggccaatcagtaaatcttttagcatcacaaaagattggtgctgaaacatggtaccgaattgggaacggcgaatgggtacctgaacgttacttaacaaccagtgacgctacaccagctgaaacaacaccagcaacagaagcacctgctgctcaaaagacagctcggattgcctatgccggtggcgcaacaactgtttggtcaacagcaacttatacagccccaacaggccaatacttaggttatggtcaaaccgtcaacgttgtgaaaacagaaactgtttctggcgaagaatggtatcaacttgaaaatggcagctgggtaccagctcgctttacaggtgatggtaagattgaagccacaccagcgcccgttgcacaaccggtagcaccagcacaacctgcaacagcgactcctgtcgaaacaccagctgcgccagcaccagttgcaacaacaccagcgcaaacagaaagcacgcctacaacaccagcacctgtcgcagaaagtgaatcaacaccagttgaaacgcctgccacactagaaagtacaccagctgtagcagaaagtagtgcgcctgctcaagcagaaagtacaactcaaacacaacaaccagctactcaagaatcatcagctcctgtccaagaaactgcaccagttgaaacaacaccagccccaactcaaaaggcaccagttgtaacgacaccaacaccagccccaacggcacctgcagcaacgactggtaatgcgcaagctgttattaatttagcgatggctcaaattggtaaaccttacgtttggggtgcccatggtccaagtagttttgactgttctggattaatggactatgtcttcagaaatgctgctggtaagagtatcggtggttggacagtccctcaagaaagtgccggttatgctgtttcattaagcaacttgcaacctggcgatttattattctggggttcacaaggtagctcacaccacgttgcgctatacattggtggcggacaatatattcatgccccacaacctggcgaaaacgttaagatcggttcaatgcaatactatgcaccaagttttgcacgccgtgtcttttaatgattgcaattaagcgaacatctcacctaggtgggatgttttttgtattttagccctaaataagctatgatatgtagagatttaaaaaaggactgacgagatgaagatagaagtacaagcatttatcaatcaaattcaagatcaaacatatttaacggatgaatacgagctccccacgccagatccttttgtggcggacggtattttggcacagttaaaacccgctattgataaagccattgaaaaacaagctttggcctctttttcggtgctgacagaatatgctggcgaacccgttaaggtgacattggaaacggggattgtgaatctaccattacaatacattaaaaaagtaaatcaattttttgaactcgacgaccaagcagaggtgaatctttatttatatgtgacatcgccactcattaatcgctcgaacatgcggattgacttaattgggacggtagcttcgtttgaagaatcggcagctgctaattggacgaagattgccgacttgctaacaaaggacttggaagccgtcgtaatcggttcacaggcgcctaaagaagaaccagtcgaaaagaaggcgcccgctaagaagaaagccgcacctaagaaaatggcaacgactaagaaaaaagcgcctgccaagaagacaacagctaaaaagacagctacccaaaaaacaacgactaagaaaacaaccaccaaaaaaaagactacgaaaaaagcagactaatttagtctgcttttttgatggcgtctattaaaggcaagtcgccgttaacaaacgagaatttcttgtggattgtttcggtcggatgttctaagacggtgcaaatcatcgcagcgacatcagcacgtgcaacttgtccaccagatggttgcattgtcactaggccggtagcttcgtcgtttgtaagtgtcccaggacgcaagatggtccaatctaaaccagagaattcaagccagtgatcggcatagtattttgcagcgtagtacggtttaatactttcaggccatttagttcgatcctcaacaaaaagtgcactgaccatgacgtagcgactaacttcagcaatcttagctgctgccatactcttaacggcgccatcgagatcaaccaacagtgtttgatcatcgcctgttttaccgccagaaccagctgtaaagacaatcgcatcatgatcggcaaatagtggtgctaaagccttaggttgtttggttaaatcgaataagacaggcgtggcccctagttgtgcaagttcatccgcctgttgttcgacacgaatgccggctgtaacggtgtgaccggcagcaacgagttggctaattaggagctggccaacgttaccatgggcgccaataacaaaaatccgcatagtaaaacctccaatataaatgtgtgtgctgtccattatagtagttattgaacagtgacgcaaagatagtggatttaaaaacctgtgttgtagtacaataaaattcggcaccttgcgaaaaaatgagtgtgctttagggtatataatcttgaaagtggctgatggcaacctttaaataggcaaagctaattgtgggattcgttttagaaataaatctaagaatcctctcattttttcacaaagttgcttattagaatatcatgaagccgtgtttgttttgtgttatggtacagatatagagattgtgatttattggataagtagtcctatttgttaatgctatctcagaaagtaggaggagaacatgacaaatcaatatcggagcgtttttgatatcattggaccgattatgattggtccttcaagttcacatactgctggcgcagttgccattggacatgttgctaatcgtctttttcatgcaccgattaacaaagttattgtgcgttactacgaatcttttgcacaaacccaccaagggcatggtaccgattatgcaattattagtggcgtgctaggattcgatccggctgatcaaagggtaccaatggcagttgatttagcgcgacgtcaaggtattgacgttgtcttcattgaagatccagggaatagtccggtgcaccatcccaatacagcggaattaacgttaatcaatcgtgagaaggaactaacgatttggggctgttcaattgggggcgggaccatcgaaatccgccaagtcaatttgaatggcattgtgattaaaacggatggcccgttaccattggtttttgtcgaatcggaacaagaaatcggcgatgctttagaccagatatttgaaggcaactatcgtgataagcgcatatcggttaaagtgccagatcggtttttgtataaaatcgaactgattgataagccgtacccggaacagattgaacaggtccgcggaatgagccaagacgttattgtgttatagaaagtggtgggaagatgtatacaacaattcacgaattagtcgagacagcgcaagaacggcaactaccaatctcggaattgattatcgaacaagaggttgcgatgagtcacactagtcgtgaagtcatttgggcaaccatggggaaaaacttggatgtcatgattgcggccgaagaaaaaggcgtgaccggtgaaggtgttcagtctgccactgggattacaggtggtgaagcggttctgttgaagcggtatcgggaaaagggaaagtcgttatcaggtgatgtgatgttgaccgctatgcaaaatgcggtagctaccaatgaagtcaatgcttcaatgggaatcatttgtgcgacgccaactgctggttcagcaggtactttacccggtgttttgtctgttattactgagcgcttggcgcttgatcgggatgcgcagattcggttcttgttttgtgcgtcagcctttgggatgattgttgccaataaggcgatgattgccggggcaactggaggctgccaagccgaagtggggagtgctgccgcgatgggcgccgccgctgcagttgaagctgctggtggcacaccacaacaatcgtcggaagcattcgcgatggcgatgtctaatctattgggattggtttgtgatcccgttgctggattagttgagataccatgtgttaaacgaaacgtgattggggccgtcgatgccttgaccagtgctgatatggcattggcagggctaatcagcaagattccagctgatgaagtgattggtgccatgaaacgaatcggtgaagatatgccatctacattacgtgaaactggtttaggtggattagctgctacaccaaccggggttgcattgaagatgcaaatctttggtaaggataagagccttaaataaaagcgacttttaggaggaacaattatgcaaaagaaactttcaaaatccgcatacggcggtgtttcaggtgagaaatatgtaccgtatgtcaaccaaggcgacaaaaaggtcggcaacttagcgattctaataatggggagcattttagccattatttttgctgcttcaacagcttattctgggatgaaggccggtttaaccgttgcagccgggattccaggttcaattattgggtctgggttagtcggtgcctttgccaaatcaaaagggattttaggcaagaatattatgcaagggatgtccagtggtggtgaatcaatcgccagtgggatgatttatgttttaccagctattattttaattggtggccacatcaacttcattcaaggggtcatcgttggggtgctcgcaattcttttttcaatggggacagcctcattagtgcacaactacttaatggttgaagaacatggtaagttggtttatccagaagccatggcgatttcagaaaccttagttgcgtcagatactggtggcgattcgcttaaatacatgggtgttggctttggtatcggtgggattattacgatgctaacttcatcagtgtttggtgtcgtcaacaacatgattagctacgttggttcatcattttataaatggaaattagacgttgaagtgaatccattacttgcaggaattggttttatcgttggattagaagtgtcattaacaatgtttgcaggtgcgattttatccaactttgcgattgcaccgttaatcggttatttcacagatatggcgggcaacagtgcgcatgtttggaataacacgagtttagccgtgaatcaaatggccgttaacgatttatcaagttcatacgttaaatacattggtgccggaatgatgctttgtggtggtttaatcggtgcgattaaattaatcccaaccatcgtgacgtcaatcaagaaaacactagctgccaaaaacgtagcaggcgaagaaaagaatacgcttggtatgattgccattgttgttggtggtgttgggatcttcgttattggtattatcattgcgcaaaacttcttaatggggattgttggtgcattactagcagccatcttaagtttactctttgtcattgtttcggcccgggttgctgggacgattggttgttctaacttgcctgtatcagggatgacaattgcgtcattagtgattatgacggtagtcttcgtattatttggttggacggacaataaccatacgcaaatcttattaatgttcgggacattcgttgtgaccgccgttgctgttggtggtggctacatgcaatctcaaaaagtaacatatgtcattggtggttcaaaatctgaaatgatgaaatatttcatgattgccgggattgtcggcgtaatcgtaactgtcggcacaatcagcatcttatcaccacaattcgttacagatagtgcaacaccagcctttgggttgccacaagcgaacttaattgctacattaacatctgggattatgacgggtaaattaccatggatcatgattatcgttggggttgtgatggcattagctttctacttcttagatttaccaatcatgaccgttgcaattggtttttacttaccaatttcaaccacttcaatcatcttgatcggtgctttgattaaagtctttattgaaaaagcaacgcgtgatgaagcgattaagaataatcgggttcaaagtgggattagtttatcatccggtttaattgctggtggttcaattattggtttaatcgggattattctccacgtaaccggtgtgttaaaagaccgcgtgattactggttttgcgaataccaatgcaatggggattatcttattggttgtcatggttgtttcgattactgtgccacttatgatgattcataaaggaggggcaacagaagatgggacgacagaaagcggagattgatttagaacaactcatctatgaaaaaaatccgcaagttcagtttaagttacaagctggccaggtcaccattattcggccgcagaatcactggattcaacggacattacggcgtttgcatgtgaagattccgctagaaacacagctggaacttgatgattatggtagttttgtctttaggcatgtgaatggaaaacgcagtgtccaccagattggccaagcactggcaggacagtatgatgaagccggtgaatacctgtatgaacgattactcgtgtatttgaatcatctagaacacacagaacatttgatccggcgggtaaccgactaagttttattaatcaattagtgaatcacatttttaagcttaaagtttcgtccaatatttggggttcacttcactcaacctctttttctatgcattatgatgatcacttgtttgtgtgatttgattaattttcgcgtgtaattcatggacttcagcttccttatctgctaacgctttatcaaatgttctttgattctttattttttctgcttcaaccgctgctttaatttgagcagcttgattgtcgcgtaattcagtgacttctttggtcatttccttttgtgctttccgttggctcaacgtgctgccagtcgctgccaagaaggtaatgatggcgccaatcaataatgacaccaaaataacgatgattaatggccatttaacatgggtgaatccaaagttaatggcgactggttcaacgtttaaaacagcaaaaattacgacaattaatgctaggaccaatactgtaattaatcgaccttgttttttcataaaactgccccccccctacttcttattcaataagttaccggcaacatagtctccgatatgtggtgccagttgatagaattgtgcaccgatcgccatcaaccatggtgcattaatttcacgttttgcatgcccgattgttttcacaatccgataagctagttgatcaggatctaaaacaacccaatcgaccgatttcaaataattaccggtcttatccgcaatatcaaagaaagctgtatcaatcggcccaggattaacggtagtcacttgaaccccaaatggttttaattctaagcgtagaccatttgaatagccaacaaccgcgaacttagttgccgaatagatggccgacttaggcgttgccatcttgcccgccattgaagcaatgttaatgatgtggccgctaccttgttcaatcatcatccgcccaaaagcgcgcgtcatgtacattaaacctagcacattaacccggaacatctgctccacaacggtcatggatgtgtcgaatgcattttcaaaacttccaaaaccagcagcattgactaacacatctggaatcccgacttcagtttgcacctgagccacaatggtttcaatcgctgctggatcactgacatcgaggacatatgcatacgccggctgtcctgaaagccggtgtgcttcttcgcgaaccgccgccaattcagcttctcgacgggccaaaacgacgataattgcccctttactagcggcttcataggcaattgctcgtcctaaaccagacgagccgccggtaatcaccacaattttacggtttaaatctctcaatgctgctaatttagtcatctgtttactcctttcgaccatgaaacggaatgtcatagatatctaagtcactaactactttcgtgtttttaaaaatatcgcgggcatcattttgtaaatcacgcactgcttgcccgaggtaccgggcagaaatatgggtcaataataaccgcttcacatgcgcggcttttgcgacctttgctgcattaatgttagttgaatggaaatattgacgcgcaatcttttgttcttgcttaccaaaggtcccttcatgcactaatacatctgcattagccgctaagcgttcaattggtggacattggcgggtatccccaataatggtcacaatccgtcctttttgagcatgtccaatgtaatctttgccatcaatttggcgcccatcagcgagtgtaaccacttctccctttttaatctttgcgtatacaggaccagccggaacaccatctgcatgcagtttctcaacttgcagttcccccggatggtccttttcaataatccgaaacccataactggcaatccgatgatccaatttagcacattcaacccggaaagtcgcatcatcaatcaaaacaccttcttcaggaagaatgacaaagttcaatggatacgttaaatgactttcagagatttttaaactcgtgcgcacgtattcttcagttcccttagggccgtaaatcgtaagtggttcgtcgccaccttggaaagatcggcttgataaaaagcctggtaacccgaataaatgatccccatgtaaatgtgtgagaaagatctttttaactttgcgcggttttaatgtcgtttttaagatttgatgttgcgttgcttcaccgacgtcaaacaaccacacttcatttcgttcatccaataatttcaatgcgacacttgtgacgtttcgttgtcgtgctggaactccagcgcctgttcctaaaaattctaattccatttagctcttccaatctgtctttaattcaacgctttattttgccgcgagggctttggtaataatggcggcatattcattgaccccagttgggttcggatgcaccttatcttggtagaaccagtcactgtgtttggcagcctgtgaataccaatcaatcaccgttaagtttggatactgtttagttgcatttttaagcgtctggttaacatcattttgccaaggacgcgttgggacaaacgcgttgagccaatagacttttcgcttagtcccaatggctgccataaattgcgccatctgttcttgcgtaaaggcgccatttgttcctagactgaccagtacagtatcgctaagggcttgtttttgatcataatcttttacaatttgaatactttgatagagttggcgcccaacagccgcatcaaccaacatattcgggaataacttctgtaaagcttgactaccgtcgagtaggacggaatcaccaattgcagtcaccgagatattctgggcccgttgaatcgtcacttgactcaagccatatttttcaaattcttggttgattggatgcttttgcgcagccgcctcagccgctttttcagcttttgaagttggaccatttgcttgtccagatttattctgggcttttgcttttttaatcaacgcatccttacgcttttggttagctttttgattttgcttaatattgaccgctaatgccgatttatgcgtatctggcgccggttggaatggcgcttgaaacgccccgactaacccgattaaaaagacaattgcgagtccagtcactcgaccaaccacccgattccaatgtggttggtgcataaattgcttcaattggtgccataactgcttgtacggatagtgtgctagtggctgttcaataaaccggtaggataattcggtcaatccgaaaataatcgccacttcaatcactggatataaaaccgggtgatcagcgatatttttgaagattatttcaaagaaaatcatcaccggaaattgatacagataaatcccgtaactccgtttacctaaccagttaaagaccggattcgtcaataaccgattccaatcagcgcctggatgagcgacaactgccactaaaacacagactaaagcactaaacagaaatagtcccccgcgatagacaagactactctcggcattcaacttaaccattaaccaaaccaaactgaggacactcactaacccgatgccatcgaggacgaggcgttgtttaggcacaatcttttgcttaagggctgttgatggccaaacaaacgccagcgctgctcctagtaaaattgaaaagacccgcgtatccgttccataatacaaacgactagggtcagcattgggttggtacaaaatggccatccagattgctgaaacaacactgactgctagtaatacttgggcaatccgatttttattcttaagaccaataatcaaggccacaacgataaaaggccaaattagatagaactgcccttcaatcgatagtgtccacagatgggtaaacggcgactcattattggcaaaccgatcgaaatacgactgaccatgtccaatttgccaccagttataaacgtataaaatgttcgtgataataatctgattaagttgctgtaacatttcccgctgaaaaagcgtgatgtacgcgcccgttgcaaacagcatcgttatcagcccagggtacaatcgttttacccggcgtaagtaaaaactttttaaattaatccattgattttgttcccactcttgaaccaacaaatcggtgattagataccccgaaaccaccatgaagattgggacccctaaataaccaccggtaaaagtatatggcatcagatggtataaaataacaccaatcacgccgattgcgcgtaaaccatcaaagccagtaatgtaacgactattctttaaacgcttcttgcccgccattttttcaacctactctacattctaataactgctattataacaatattttagtgatgtgcctacattaagccctgttattttatgcatcccatagaaaaaggaagcattcaaaaatgaatgtcttcctttcttgacgtgcctattattcgacaaattcaaacgtaaagttatcaattgccactaaatcaccatcatgtgcgccactttcgcgtaaggcttcgtcaatccccattgaacgtaattgacgggcaaaacgcatgacaccatcttgatgatccaagttactcatcttgaagagtttttcaaccttgtcaccagacacaataaacgtgccgtattcatcttgttcaatgatgaaagcaggtgcttccggttgatattgataaagtttttgcgtttgaacttcttcgacgtctcccattgggaattcagtcgtttcagctaataagtcagctgtcttgttcatcaatgattgcaccccttgatgcgtgatacttgaaatttcaaaaatctcatgtgtatcgccggcagctgctaatttttgtttaaactcggctaataattcagaagaacctggtaaatccatcttagtcgctacaatcacttgtggtcgttctaagatttttggatcataggtctctaattcgtgattaatttgttggtaatcttcaaatgggtcgcgacccgtttgatcgtccatttcgattaaatgcaagacaacccgtgttcgttcaacgtgccgtaagaattgaatccctaaaccaacaccgtctgaagccccttcgattaaccccggtaaatcggctaagacaaagtcccgaccgtcatcgagttgcaccatccctaagttagggaccaacgttgtaaattggtaactagcaatcttaggtttcgcacttgtcaccactgacaacaacgttgatttcccaacagatgggaaaccaaccaacccaacatcagcaagcacttttaattcaagttgaatgctgcgttcttcaccaggttcaccgttttcggcaacttccggcgcactattacgggcatttgcgaaatgcatattcccacgaccaccacgaccgcccttagcaatcactaattgttggccatcttcggttaaatcaccgagtaattcattggtttcagcatcgcgcaccgttgtaccaggtggcacttgaacaaatgtatcctcggcaccgcggccgtacatttgtttattctgaccattaccaccactattggctttaaagtgatgacggtaacgaaagtccattaatgttcgtagaccttcatctaccactaaaatgacacttccgccccgaccaccatcgccaccggctggtccgccaagtggcacaaacttttcacggcgaaatgcaactgcaccatcgccgcctttaccagctttcacatcaattttgacttgatctacaaacatattttgactccttctcatcgttaaacagtaccttatatactaccgaaaaaaagattaaaagtaaacagataactggttaaacactgaattggctctatcatcgataaaaagcgcactgagtgagtgacctcaatcagtacgctttttattcgttaattaatggctagctggcaccaatttaaattggctccatggtttcaaatagtctaataggaataattctgtaggcgtaatacggccaaccacattcacgcgcccgtcatttggcatggctttgagggcaatttgggtttcccctttatactgaccgtaaccgacgttatcgattaaaatatcaccgtgttggatgtcaactgtatggtgggctgggaaaagcaggtctttaaaaatgacccgtgtcatcgttgaccgtagaagatattctgaacgatcgccacgataactatgcagactttcaaagaggaccttgcgttcatcagccgtaatgtcatctgcgacgtcgattgcgattgctgggaattcagcgttaaagacgtcatgcatcgtcttcaattctgcttccgaagcatacgcattaccgacaataatgtcatcaatgttatccattaaaacgtaatgtttcatctgcgttgccatcgttaaatcgcgatcaacttccatcgtgggcaacccatcttgtgttggccatggtccgaaagtcgcttcatgtgaattgacaaacgctgctgtattcaaattgtattttgcaaattgcgccgtacattgtttgaagaagtcttcacctaatcccgagaaccgatgtggatagaagttatgacaacctaacaagttttctcgtttgggtgaataactcataatgttatcaacgtaacttgtcccttgactcatattaatttcaatttttaaattaaacggattgcgcgtcatttccgcttcttcttggccggtaaaaccgttgtccaaccgaattccccaagcaccaagttcatggaaaaaacttaaattatcatatgaaataccgagttgcttgaacaaacccggattgatatcaatcatgacttgcattcctaattggttggcatgggctacaacccgtttaaagttgcctaacacggcttcttgatcgccagacacctccaataatgatgtaaagacgcgttggaacccatattgatgcgctaaatctaagtaagccgcatccttttcaaaagttgatcgttctggataaattgaaacgcctagttttcccatgaatagaacctcctaataattgggctataccaccctgtcatctattagtctagcataccttaagcacttttgaaaactcttacattacttttaaactggtctatttctggcattgtccgcagtttgctcactaacgcaccaatctttttttcggtctatatcagcgttttgatggtttttgaacgtttttgaaatatttcgattgcttttgaatggaaacgatgtcataatgatgctacggaggttttgtcatgttaacagaagaacgtcaccaagcgatattacaacttttaaagcaacaagacgtcgttaagatgcaatctttgtgccagttattgaacgcttctgaatcaactgtccgtcgtgacttgcaattgctcgaagaacaagggcttgctactcgaattcacggtggtgctaagcgcatcaacacgttacaagaagaacttggccagattgaaaaaaacggcaagaacgttcatgaaaaaaacgcgattgctaagtttgccgcagcacaaatccaacaaggctgcgtcatttacttagatgctggcacaacgacccaggcaatcatcccctacttaagacctgaaatgaatttgacggtcgtcaccaatggggttgataccgcttctctcttagccgatcaccaaattcaaacctttctattaggtgggcgtgttaagagcaaaaccaaagcgatggtcggtgcggctgctttagaaacccttttgcaattccaattcaatcaggcgattcttggcacaaacggtatcgatgttgaagctgggctaaccacccctgatccagaagaagccactctaaagcgctttgcgattcaacaagcgaaccaaacgatggttttggcggatcacacaaaattcgacgctgtttcgttcagtaagtttgccccattggcacaagtccaattgattactgatcaattgtcaccatctgtttacaaacactatcattcacacacagaaatccaggaggttttatcttgatttatacgattacggcgaatccatcaatcgattacgtcattcaacttgaaaaactaaataccggtaacgtgaaccgcgtccaatctgacgttaagctccccggtggtaaagggattaacgtttcacgcatccttgccgaattagcattaccaagcgttgccctcggctttgtcggtggcttcactggtcaattcattcaaagcaaactcaacaacgcttcgatcgactgtcgattcactgaagtcgaagaagacacccggattaacgtgaagttaaaagacaatactgaagaaactgaaattaacggtcaaggcccacacatttcagcagaagccgttgccaacttgaaacaacaactgactaagctggaagccggcgatattgtcttcatgtctgggagtttgccacctaatttaccggctagtttctacaaagacttaatcccattgattcaagcgcacaacgctgaatttgtaattgatacaaccggtcaagctttgttagacacattggctgaaaaaccattggtcatcaaacccaaccatcacgaattggccgaactgttcgacacacactttgccaaccaaagtgaaatcatcgccgctggtcgcaaattattagaccaaggtgcccaacatgtcttggtctcaatggccggtgacggcgcccttttaatcacaccagaccacgcttacctcggtagtacacctaaagggacagtgattaattccgttggggctggtgattcaatgatcgccggttttgtcggcacattcgcacaacatcacgatgcactcgccgcttttaaaacaagtcttgcttgtggtagtgccaccgccttttctgaagatttagccactagcgctaagattaacgaactcttacctcaaattgaaatcacacaagttgattaattttaaatacaaaggagatttattatgaacatccaagatttactcttaaaagatgcgatgatcatggatttacaagcaacgactaaagaagccgctgttgatgaaatggttgcccgctataaagacatcggtgttatcacagatgacgccctctatcgtaaagatattttggctcgtgaagctcaatcatcaactggaattggcgaagggattgcaatgccccatgcaaaagacagtgccgttcaacgcgcaactgtgctattcgctaaaagtcaaaacggtgttgaatatgacgcactagacggccaacccgtttacttgttcttcatgattgccgctccagaaggcgctaacgatacgcatttacaagccttggctggtctttcatcccttttaatcaacccacaattagtcgctgatttgaaacaagcccaaacaccagaagacgtgcaaacgctctttgctaaggctcaagctgctaaagacgcagaagatgcgaaggaagaagctgaagaagccgctaaagcacaagccgcagccgcaacgccagctgatgatcaaaaaccattcatcgttgctgtcacagcctgcccaactgggattgcccacacttacatggccgaagctgccttgaaagaaacagctgctaaaatgggcatcgacattaaagttgaaacaaacggttctgaaggcgttaaacaccaattaaccgctgacgatattaaccgcgcaacaggggttatcatcgctgccgacaagaaagtcgatatgcctcgttttgatggtaaacatctcttgaaccgtcccgtgatcgacggcatcaagaaaccagctgaattgattcaaaaaacattggatgaagaaggctcaatctatcacgcaactgaaagccaatcaagcgaagaagcttcagctgacaagaaaaccctttggagtcgcatctaccaagatttaatgaatggtgtttcaaacatgttaccattcgttgtcggtggtgggatcttgatggccatctcattccttttggaacaaaccgttggcgcacattcaaccacttttattttcttgaactcattaggcaataatgcctttaacttcttaattccggtccttgctgcttacatcgcgatttcaatcggtgatcggcctgccttaatgcccggatttgtcgggggctacatggctagccaagcaacagccagtgtccttgcttcaaagagtccagccggattccttggcggtttagctgctgggttcatcgctggttgggtgatcgttggtttgaagaaagtcttcaagaacttgccacaaacccttgatggtttaaaaccaatcttaatattccctgtattaggactattgattgttggctttattatgtacttcatgatcaacccagtctttgctcaaattaacctctggttgagtaccttcttaacacacttaggggctggtaacgcattactacttggtgcgattttaggtggcatgatggccgttgatatgggcggtcctttcaacaaggctgcttataccttcgcaatcggtgtcttcacaaccaccaaagatggttcattgatggccgctgtcatggctggtgggatggtcccaccattggcaatcgcggttgctgctactattttcaaaaacaaatttaccggtagtgaacggaaacaagccttcgcaaactatgtattagggatttcattcattactgaaggtgccattccatttgctgcatcagatccgttacacgtgattgtttcaagtgttatcggttcagcaatcggtggtggtttaacccaattatggcaaatcactgtccctgcaccacatggtgggatcttcgtggcaccacttgccaaccacggcctactctttgtgcttgccgtgttaatcggaacatttgtcagtgccctaatcttaggcctctggcgtccagtggcaaaagaagcttaatttaaaaagtcgtagtcaaatgactgcgactttttatttatcttgaaaatcagtattgtgcttttgtttccattcattaatgtaattcaaacgttgtttcatccgcgtttcattgccttgttcggtcggccggtaataaatatggtcggcgatactctctggtctagttggcatcgtggtcaatctatcatcgtagaaatgtgcgagttgatatcctttgccgtaaccgacttccttcatcaatttcgtcgccgcattacgcaagtgcaatggcacgggttcatcaatcgtctttttaatatccttttgcaccgctgtccgcgccttataagtggcgtttgatttcggcgcaagcgatagataaatcacgcactgtgttaaatgcacgtcgcattccggtaagccaatcgcctgacaagcttgaaagacgttcattgctaaattcaatgcattgttatcggccagaccaatgtcctcactcgcaaaacgaacgagccgccgagcaatataaatcgggtcttcgccgccgtcaatcatccgccccaaccaataaatcgctgagtcgacatcactattgcgcatcgacttatgcaaagccgaaataatattatagtgttcctcaccgtctttatcataataggcggtttttttatttagcagttcccccaatagatcgccatcgacggtcacttgatggtcttgcacatcactattaataactaacatttctaaaatattcagcgccgtccgtgcatccccattcgaaaagatggcgacttgcttcaataattcatcactgatatgaaccgttaaatccgggaaggcttggggcgcctttaaaacccgttgtagcaactcaataatgtccgcttccgtcaattgctttagcacaaaaacgcgtgaacgtgatagcaacgctgaattgatttcaaacgacggattttcggttgtcgcaccaattaggataatgctgcctttttcaacatacggtaaaaaagcatcctgttgcgccttgttaaaccggtgaatttcatcaataaagacaatcgtccgctcacccagttggcggttttcttcggcttcattcataatcttccgaatctctttgatcccattcatcgcggcactaaacgtgataaatttcgaagccgtcttgcgcgcgataatctccgccaacgtggtcttcccaacgccgggtggtccccagaaaatcatcgaagtcacttgatctttatcaatcatttcgcgtaaaaacttgcctggtccgactaaatgcttctgaccgacaaaactgtctaaatcagacggtcggacccgattagcaagcggcgcattcatcgccatctcttgatcaaacaaagaggtttgtcccattttttcaccccactttagttgttgttaattgaaacttcttaaaatgtgcccgtaaataacttaaggttaaactctccgcgtctgaggcaacaagctcaaatggtgcacccatcgccatcacttggcccccttgactaccacctttaggccccaagtcgatcaggtaatcggcattggtcatcaaatcaaggtcgtgggtaatcatcataatggtggcacccttggattttagctggttgatgacgcctactaaggtttcaacatcgcgcggatgcaacccaacagaaggttcatcgaagacgaataaagtgcccgcccgttttttattcaaatgcgttgcgagttttaagcgctgtgcttcgccacccgaaagactcggtgtactttcaccaaggtgtaaataagctaagccaatttctttgagaatcttaagttccttttgaattgctggcacatctgcaaagaccgggattgcttcttccaccgataaagccaatagatcaacgatgctatagccttgccacttgatggcttcaatctctggtttgtagcggttaccatgacattctggacaggtttcttccatgtctggcaaatattgaatatccaaaataatgctgcctaacccaccacagttcggacaggcgccttctttattgttatacgaaaagtgcgcgatcccataatgatgcgcttgtgattctggtaaaccagcaaataatttccgcagattgttcatgatactcgtataagtcgcgagtgttgagcgtatattcttaccaaccggcttggcatcaatgctgacgactgacgttaaatcggtcgtcaactgggtgccctgctcgggtaattgctcatgttggtggtgcgcttcaattgctggcactaaactatctagaatcaaactcgtcttcccggcgccggaaaacccagaaaccgccgtaatttggttatctggcactttgattgtgacatcatgcagattaaaatattggccaaccgtcatcgttgtctgctcaccagtcgttgcggcagtgactttaggatataagatgttcgctcgaccagcgatatagtggccaatcagggactgtggattctggatcaaatccgcgggtttcccttgggcaatcacttgttcccctttgcgcccagcttctggcccaatttcaatcacccaatccgcttgactgatgatattcacttcatgatcagctaccactaacgaattgccttgtgccactagctgccggaaaatatgaattagcccttcgacgttgtcaggatgcagcccaaccgatggttcatctaaaacgtacaacacaccagttgtcgctgttcgcaacgtccgcgccaattgaatccgttggagctcgccagtcgacaatgtattcccattgcgcgacaacgttaaataatccaaccctaattctagtaacggttgcagtgttcctaataggttcttaaataaaattgtcgccatttgctgcatttcatccggtaagtcggccttagtagcacgcacccaatcttctaatgcgcctaacgtcaaattagaaactgctgcaatgttttgtccgccaactgtttgggtcagtaatgccggatttaaccgggtcccatgacacgttggacaggttgaaaaatggaaaaatgaattgactttagccattgcccgatcacttttaaccgattttagcgattcataaacagcgtcataagcattttcatagagggtattctccgtactaaacacacggcccgttgaggtatggaaatcaaccgcatacttcgcccgtttaccatgcaggacaatttctttttccttggccgtcaagtccttgtaagggacatcaattcggaccccaatgtgggcagcaacggttggcatgaaattccggcccggcaatcgccatgaggcaatcgctccgtcttcaatactgagattttcatccgcgatgattttgcgatcatctaacgtttgaatctgccccgtcccatgacattctgggcaggcgccagctgaattaaaggcaaagtcttcggccgatttagccataaactgcacttggcaagtagggcacgtaataatccccattttatcgccagctaagtccatcgcttgggcaatttttagacttggttgaatcacgtgcccatttggacaacgtgtcgtccctaaccgtgaaaaaatcaatctgacgacattaaaaatctcactcatcgaaccaacagttggccgttctgatggcatacttggtcgttgccgaagtgcaatcgctgatggaatatgccgcacttcttggacttgtgagcgtttattctgcgtgattcggcgccgcgtgtacgtcgacaacgcctctaaataacgccgtgagccttctgcatataaaatccccatcgcaagcgaactttttcctgaaccagacggtcccgaaatcgccacaaattggttcaacggaatatcgacgttaatatttttcaagttattgacgttcccgccacgcacttcaatctacgttggttgttcaattgtcattattggttcgctccccttttgcttgacggttaaaaacggccgcctctgcttctaaattcgctaaaattcgttctaaatagccgtcaacagctgccacttcagcatccgaaaagcccttgtaaaaaacggcgctcaatcgttgactaacgtcatcaccgacctgttgctgattagcgccttgttcagttaagtcaaagacccgcttgcgcttatcaagtggcgattgctcactcatcaataatccctgttcttctaagcgccgtaacatcaacgataaactactattggctaagccagtcacttgtgccaattccgtagcagtttgcggatgatgatcccacaatgctgacaaaattttcccctgttcagcgttatagcacgcgcgtggatcagccgttaaataacgattaaaaagtcgggtatttaataagcgaatcttcaaagttaaataaccaccctttttggttttcatcccgtccactcctaaattgtttttatatcagcattaattatatcttactatataaaactaattttagcgagtaaaaaacaccatggtcaaccacggtgtttctaaagaagctgtttcaattgttctgcttggacactgcggacttcttcgactactactagcgcctgcttgtcaatcgttgagaccaccggtacgagcgtcgcgagttgtttggccgtacaaatgacatacagcatcggccggtcattttgactatagtacccttgcgctttaatgatcgtgatgccttggtggaattgcgtcgacaatgtttgggcaatcgttgcatattgatccgaaataatcgtcaccgcgcgttttgccccaaatttagccaataatttattcaaaacgactgctgataaatacaattcaataatcgttaagagcatattttggaagccgataatgaagccggatggaatggcaacaattaaatcaaaaaaaagcatcgcagagccgttttggatccctaaatagcgattggcaatcttcgctaagatcgtactaccagcaatcgtcccttggcaatgaataataatcgccattgcaatccccatcaagacgccaccaattatcgtcggaatgatcgtctgtgtcgtatggtagccgataaaatgcgggagccgcaagaagatagaaatccagagtaccgcccagaccgaataccagatggtttgcttctctaaatacttaaagccgacaatcactaataaaccgtttagaaccaaattcgtagcagctggcggaattgctaacgcatagtagccaatcgccgttaagccagtcacgccaccttcaccaatatgatgaggaatcaggaaatcattaatcgccaccgcataaatcaaggcgccaatgataatcccgagaccatttttaaaaagtgcttttttctgcatcccactcacgtcctcgttcaaactaacataagcgtaccatatttagggtgggagattaaagaacaattgattaactattaatttacaatactctatatttttcctgtgctaagaaaccatttacttactttagaacactctgccagtcattacttgaagcccatccattgtatatacttccacaatgtccctatcaacaatcagcaatacatcatcaatatttcctgtaatttgacgcctttcaattttcgatgttgcccattgacgtctttcaaatataaccggtcctgatactttttcaagacagcattttgatagatttttattcgcgcgttttataatcaagttagccaaatacttttagctaattgataaaataaaaaacaccaagacaaatctctgttatcattgatgttcctacacaaacaatgaaagaggttattgtcttgatgcaagaacagaataccacagtcagaaaaaaaggtcagcacctaacttcgtttaaacgaggcagaattgctacgctgcacagccaaggctattccaatcgtgcaattgccagagcgcttaatgtttgtcatcaaacaatcaataatgaattgtgccgcggcgagatcgaccaagtaaaaaaagtgaatggtcaacgccaatattacgctgtatactcaccagaaacagcacaagctaagtacgaagctaatcgagcccactgtcatcgacctttgaaactcgtatatcgaacagtttgtccgtaattccatcataggagccgctcttgcaacgtctgttgagcgcaagacacgaaagtatgtcgcctataaactgagagatcatacaagtaactctatgtatttggcgtttaaacagttaatgaaggattttaagggagctgttcattctgttacatgcgatagaggtactgagtttatcaatcaacaatatgtgtcagaactagaagcatctggtttatcactatactttgcccatgcttacagtccctatgaacgtggatctaatgaaaatcataacggcttacttcgagaatattttccaaagggaacagacttcagtaaaatatctcactccgaattaaattatgccgtagagagcattaataatcgaccacgtaaagtcttaaactggcagacagctaataccacatttaaacttgtatcaaccttaaacctcgtgtaagcttaaaaaaaaaagcaaatgaactctaagcttatttaagtagcaaaaaaattggtataggtagttatttaactctattttgatcaatacaaaaaaacagatgctttcaacacttcaaaagcaacactttttagaattaaacatcagattgatttaatagaaggtaattattaaaggtataagttatgtatttttatataacttatacctttaataattgacttattttttgatataacttatactttatatataaaatacagatggaggtttcttatggcaactacattaactatcggtaattttaaaggcggtgttggaaagaccaagatggcgacaatgcttgcattcgacaatgcccttatcagaaacaaaaaaaccttagttctagatttagatcctcaaggtaacgcaacaaagatcttagctagaacaggtggtctttcaaaaattcaatatactatcacagaccaaattattgatcgccacagtaaaagatacacagaaacattaaaagcactcgcacaagagtctccagataaaggtattcaacaactagaagcagatccacgcgctattatatatactttaacaccagaggaaagagcagtctcactggaccaatgtatctataatattcgagagaatctcgacatgattggctgcgacactgcatttagaaactttcctgcatttattcgcacgtattcaaacgacgagcaagaacaagtacgttttattgcaaatctaattaatgatttaaaaaaacaatatgatactattttcattgatgttccaccgactatttcagaattttccgataacgctatggccgcatctgattacagcataattgcttttcaaacccaagatgaatcctttgatggtgtgaataaatatattggctatcaaaactttatggttgaacaatttaatattaatcttcaagttattgctattgttgcttgtatggttgaacctgatgataatcttgatcaggaaatttacaatgaggccaaagaagcgtatggagatgtcgttgctgatactatcattacgcaccaaaaacgacttaaaagatactcaagagaaggtattgatttaaaaacatataaaaatggtaactttgatcaatgggacttcaaagctcataacggattcaatgaaattcttggagagattgaaagtagagatcaatatttgaaatcattataaggagtgagctaaatggttgtaagacaatttaacactgacaatacagaagaaaaaaaattcacacgattactaaataagccacaatcaaaagttcaatcagtagaaattgccggcgaatattcatttggtaccggtacaacaatgaatagtagaaaagcaacatctaaaacaacaacaccttcttctccagcgttagaaaaaggatcaaaaaagcaaggtcgccctgttgaaataaaagatgacagataccaggtaacacgtcctaagaaaatatcaccagctttagaaagtaaattatctctattgcaagattatatgacagaatttgctactacaactaaaagaatatcatttgataaacttgttaacactttagctgattcctatatagatacgagacttggtatggctaaaagcgaacacttaaaatcagaaattgctgctgaatttgagaaaataaaaaaataaattatatttatacacaagcaaaaaaggtataagttatacacgttctaaagcagaaagggtataacttataccttttaatttgttgaatatcacttccacagcaacaaattaaccaattccaaaaacttataacttatacatttaatccatttaaagtataagttacatctagtaaaaccgagtataacttatactttaattatagttgtcccttgctatacttcgatataaatgttattttcaaatagtaaataaaaagccatcacgaacggtaattcgtgatgacccactttaagaagttatttgactgtaatttcttctaaactatgtctttgattataggctattttgttcaaaatagcaatataaaaaggcttgtttgagtatacataaaagtaggtcgtgcggcttttcaaaagagattctggtttaaccaggctcgcatttgcctactctaaaaacactagagcggactcgcaaatgcgggttcgctctttttaattgataaggagatctaacatggataatcaactgaactattacaacattaagcgggaatacgcacttaaattcttccaagttcctaaggtctttatgacaaacgacaaatataaaaaattgagtgctgaagcaaaacttgctttcgccattctttctgaccgcctccaactttcaatcaaaaaccattggttcgataaagccggcaatatttattttatttacactggcgaacaactagagcagattcttggttgcggacactcaaaaatcacttcaatcaaaaaggaattaactgaggcccaattattagttatgaaacgtatgggacaaggtaaagcaaatcgtatgtatttacttggaccggaaattactgataacgatatttatggcatcgatcaacttgaaacagctgaaaatccactcgcagaagaagttgtaaacattgatttaccaacatctatgaatgatggacagcctgaaacccttgataaatctagattgctgaaaaacagtaatctagattaccgaaaaacggtaactagtgatactgatattaataatactgaatatcttaaaaccttaaatacagatactaaaaaaacagatactctaacggacagtcctcaaaatatcaagcagctacaagacgctgcgctgtttgaagtgcaattagaaaacgacaatatcttttctaaacaacaacttttagccttaaaactcttatcaaacggagattttgaattgttttgtactgttcaaaaaacaattctacgtgccaaaaaacaagcattaaacagtcatcagatacaaagcagcttgtttgatttacaagacgaagacatcgaccaacctgtttatgatgccttaatgcgaattgtccaacaagtacggttgggtgcaatacaggatttaaatagctatgtatttagcactatgtttgatcagtttgagcaactaggcagtaaacgtgccataacagcatataaaactagtggggcaactatcacctgggagtaacttttaaggcgctatcaggctaattattagtacccagggtaatttttattaaatttcatgttgcaacttaattgtctgctatgtcatgatgtacacgaacaaagcgaacaagggttcgtcaaaaagggttaaataccgtatatacaacgtttgaaaaacataagaagctttattttcatgttaaaaatttaattaactaaattcataattgttagcggttaataaattgtatgatttgttaatttattaaaatttgtcgttaatcggcatttagtttaaatttacaaaaatattggaggtagtagcatgaatacgctatattttcacgccacatttgtcacttagttcgtgaattgcaaaataaattcttaaaatttatattgcaattaaaaaaacttaatggtaggtattaatgtatggcgagcaatacaagcatttaagcaatgacactaaattagcctatatggtactaaaagaccgattagagtattctttgcgcaataactgggttgatagtgaaggacacgtctactttatctttaccaatcaagaactaatggacttgttcaattgttcaaagggaaaagtcatcaaaataaaagcagagttggaatcaatcggattactcgttcagaaacaaatgggctttaacccgaaaactaagaaaaatgaaccgaatcgcttatatctgtccaagctcgatgtgaaagcaaccgatgtctatttacgcggcgaatttggtcaaaaaagctctcaaacccttgctacgagcggaagttcaaaaaatggacttaatctatatagagaacctaaagaaagagacaaaaacagatgcaatatagatactcaaaagttggacttttccacagccaatttctcaccagcagaaattcaaaaacaaaaccaggatctcataaatcatgctaatgacttcttaactgatgaagacagtggcttacccgttttcttagaacccgaagccgtgcaactacttagtttttggtgccgtaccccgcaacaaatgcggcgcttcattggtattatcttaaatgctaagtaccgagttgaaaaggatcatcaagatattggcgtcataatcccgctttacgacgaagaactaaaacctttgatgactaaagccttaagacgctactttaacgccctaagaagcaatgaaaagcatatcaagaacgtggaaaactacttgtacggcaccatgcaaaacctatttggcgtttggtggaataaacaagcggctagagaatatgcggccaaacaccccgaagaacagaacactgacaatgagcgttcttgaaattaaacgtcatatggactcatttaagccgttttaagtgttgcatgcataattatattaaaactgctttaaaatcgtttagaagtaaaaataggtgccttaagtggttgaacaggtgatgactgaactaagtgaaagtgaagggagctttttaaataatcaaaccaagcaaagaagtcgaaaaaatagagcaattgttggctgacccctggacagtcaatatttaaggcatttgggaacaagcggcacataatccagaccctgataagcgcaagttgtttgacgcgttacacacttacctcttagataaacggcaagaaaaaaattatcaacgaaaagcatttcgtgatttaacatggacgagtcaaagaatcagtggttggaatgaaaaggaggcacaaaatatgactaagacacaagcatatatggacaagtatcaatttacagttgcagaaaacaaacggtttgctcgaacaaattttaccaagctagtacacactagtgcccgctttgaaggcgtaaataccactttgccgcaaacacaaaccattatggacggcatgagtgtggcaggcgttcctgttgaagatattttgacaattgttaacttaaagcgtgggtggcaatatatcactgatcaaaattcctccttaacgttaaccatggaaaaacaaattaacaagattgtggccgcggaagacgccttagtaccaggagaattacgacaaggaaaaggaggagttgatttaggcagtgaagacttttttgaaccacccttaattaacgaaaaacaagaacaatcctttttacaaaaaattttggctgatccgcaaacaacgaccactgataaagcattgactgttatgtatcataatatgcgccaacaaatcttttgggacgggaacaaaaggacggcgactttaagtgctaataaaattatgattgacggtggtgcaggcttaatcaatgtgccgttagataagtgggatcaatggaacgaactaattgccaattattatcgaactaatgacatggctaaaattaaacggtggacatatgacaatggcattcaaggattacaaattagagcaaacttagagcttaaatcagttgaagacgaaattggtaaaagaatccaagaacaattaaaagattttgcggatcaaaacccagaaattaagccaaaaaatgatccagaaaataaaaacgatcggcctagttattaggttgatcgtttttgagcttattcggcttatgggcattaacgtaatcggcaaatgtttttaaaagctcttcggtttgttcaaccgaaaggttatcagcttgaaagtatttttctagcaaagctcctttttgaattaatcggcgagaacgagctttgcggtcttgccgactttcataatatttagattgccgtaatttaaaatcttcccgctcaattttttgttttaaacgcgcttgctgctcgactagtttttcatattgattagacatagaatttccccatcgcgtatggttaatgatctacggactttacctttaaaaattcagaaaattgcttagctaaaagcttaatctgatcgttagacaaattagcataatctaaattggcttgactgatgatttgtttacctagccgttgttcaatcttatttttttcgtccttaattttttgattaagggcttttaatttagcttcttgtttttctaagttactttgagacataatgatccctccaatcatatttgaaataatcaccgaaactatatcatataggaaacgttaagtcaaagtataaaagttgaaatagcgaagcggaaggcatacactaaaagtaaattcaggataatcagcagaccgagtgaaacgaggtcaatgcgcacttacacacaacaactaaagttggttgtattattgtgctaaacccttgtatcagaagtcgccgttggcgacaacaaaagcaaacccataaacctaaagaaaggtggtgaccgacatggcaatttttcacatgagttttcaaaatattagtgctggtaaaggacgtagtgccattgctggagcaagttatagaagtggtgaaaagttattcgatcaaaaagaaggtcgaagctatttttatgctcggtcagtcatgccagaaagctttattttgacaccaaagaatgcgccagaatgggcgagtgatagagagaaattatggaatgaagtcgaaagaaaagatcggcgagcaaattcacgctatgcaaaagagtttaacgtggctttaccagttgaattaagtgaagacgaacagaaagaattattgacaaaatatgtacaagaaaattttgttgatgagggtatggttgccgacgtagcaattcatagagatcacccagataatccgcacgctcatgttatgctaactaatcgtccatttaatccagacggaacatggggattgaaaagtaaaagggaaaatatattagatgaaaatgggaacaagacttatacaggaaatagtcgttttccaagatcaagaaaggtgtggctagttgattgggataaaaaagaaaaaattactgaatggcggcacaattgggcggctagtgtcaatcaagttttagagcaaaaaaatattccggatcggatcagtgaaaaatcatttatcgagcagggaatagatgatacaccaactcaacatgaggggatcaatagcaagcggcatgaaagaaaagaatttaaccaacaagttaaggactatcgtaaggccaaagccagttataaaaataaccaagaaaaagtaatcaatagaggtcatttagatagcctaagtaaacacttctcgtttaatgaaaaacgggtagttaaagagttaagccatgaactgaaaacttatatcagtttggagaacttagatgataagcggcgcatgctatttaattggaaaaatagcaccttaattaaacatgcagttggtgaagatgtgactaaacaattattgacaattaaccaacaagaaagctcattaaaaaaggcagatgaactcttaaacaaagtggtcgatcgtaccacgaaaaaactttatccagagcttaattttgaacaggccacgcaagctgaaagacgagaattaattaaggaaaccgaaagcgagcaaacagttttcaaaggcagtgaattaaacgaacgtttaatgaatattcgtgatgatttattgactcagcaattattgacctttaccaagcggccatacgttggttttaagttattaatgcaacaagaaaaagaggccaaaattgatctgaaatatacgctaatgatccactctgatagcttagaaagcctagaacacgtcgataaaggactactagaaaagtattcaccagcagaacagcaaaagattactcgcgcagtcaaagatctacgggcaatcatggccgttaagcaagtcattaaaacgcaataccatgaagtattgaaaagggcctttcccaaaggtgatttagatggattgccattgattaaacaggaacaagcctatacagccgtgatgtactatgatcctgttttaaagccatgtcaggccgaaacgattgaacagtggcaagcaaatccaccacaggtgttcagtccccaagaacatcaacaaggactagcttatttatcgggacagcttagcttagatcagttagagaatcatcacttacaacgggttttaaagcatgacggcactaaacaactctttttgggtgaatgtaaagtcgatccaacgattaaaaacagtcagatcgagaaaatccaaaaacagttaaaagggcaacaagccaaggacgaccagtacagaaaagcaaatatcggacattatcaaccactgaattacaagccagttagtccagactattacttaaagacggcctttagtaacgcaatcatgaccgccctatatgcccgtgatgaagattaccaacggcaaaaacaggcgcaaggtttaaaggagactgagtgggaaatgacgaaaaagcaacggcaacaccaaactcgaaaccggcatgaagatgggggcatgcacttgtaatgtaaatgtaaaagcaaatgtacacaagtgtgttcaaatggtgctataatttagttaattatttaagaaaggagttacctgcatgtggcaagacaacacgaatggattagtttatctcaggccggtatcaagctagggcatgatcgatcatatgtaagcttatggttaagacggcacccaaatagaatgcccgaagaatacttaatggaaaccggcacagttaaattaatttcattggaaggcattgaatggataaggaaacaaacaaaaaaagagggcgtcctcgtcagcagtagagttgctaacggggatcagcacctagaattacgccttctaggtgtcaccctcctaacaatccattttaccgggtgggctaggggaaagctagttgcttaatatttctagcctagaaaagggcaatataaggaggtgatccaatgaaagtagaaagctggcaaggcattaatggcaagctagttcatgatgatcaaaaggcgattgtggttgatgacgaccacgcactaactgatccaaaacagttacaagcgatattagatcaagacggtcagccaatcgatgaagttcggcaagcaatgattaagaagaccgttaaacgccagttgaagactgagccgttaaagcttagtggttggtttaatcgccaccaagacagtcaaaatgctaaaaaggccgaaaaattggtaagtgataaaccgactcatcaatataagcagatcaaaaatgaaatgaccttttttggtgagagtttcctggaaggtttcttaggtttctatggcttagaagctgtttagtatctttgattttgacccaataatttgataaactactgtcaaaaaagttggtgatcatatgcaacattttagtcatcattaccaaagcgatatttctcggcaacaattcgatttgatccgtcaggatctggaagcttcaagaaaacgaactcacccaaaacacattgatccttatgatatcttctgtgccatgctctatgtccttaaaaatggctgtacttggcgtgatttgccggctgattatccaaagtggtccaccgtttactactattggatgagttggtcaaaagcccccacccctgataaaccagctttattaactcaggttttaaaaaaattgtcgctgatcgacgattaaggcaagggcggtcagcccgaacttcgttcgtcattttagatgcccaaagcattaagaacaccgctaccgctgaaaataagggttacgatggtggcaagaaaatttccggcattaagcgccatttagccgtcgacatcaatggattcccgcaagctatccatattacccgggctaacatcactgatcgtgacggggcgattgcactcgtcacccttaatttagagcagtttaaattggttcgaaccatgatggttgatagtggttataccggccaaaattttgccaatgagattagcagtttaacctcagccaaggtaatcgtcgttaaaagaaatgagttacaccaattttcggttatcccccaacggtggctcattgaacgttcatttagttggttgggaaattatcatcgtttatggcgtaactgtgagcgtaagctcaacactagtctcatgatggtttcgttagcttttatcaggttacttctcaaaagatactaaacagtttctaagattttttgatggtatctttagattgggtcatgaagtccgtcctaacttattggttttgtcacttataagtttaaggcttcatggcctttttggtctagttatttaggtgttgcacttacattgtaaatccggcgtcacaaaaaaattgactgacgagtaaataattcgttgactcgtcagtcaatcgcgactatactgtaggcgaaaaggttgatcagataccgacatattaaaacgtgtttcaagtttgaccttaaggaggatgacaaaaatgacaacagctattatcgaacttgaccatcttcaaaaaaactttggcaagtttgccgcattaaaagatgtcagtttcacgttggcacccggtcaggttctgggttttctaggacctaatggggccggcaaatccacgaccattcgagttattttaggcttattaaaaaagagtggcggctcagtgaccgtcttcggcaaagatgcctggcgggatgatgcggcgattcatccacgcatcgcctatattcctggggacgtttatttatggccaaatctttctggcggcgaaattatcgacctattgctacgtttaaatggccgccagcataatcaaaagaccgatgaactaatcaaggcctttgaatttgatccgaagaaaaaagctcgtacctattcaaaaggcaatcgtcaaaaagtagcgttaattgctgcgttgtcgcaagatgccgatttgtatatttttgatgaacccacttctgggcttgatccattaaatgaacagactttccagcaagaagttttaaaactgaaaagagccggtaaaagtgtgctgctatcaagccacattttgtccgaagtcgagcgaatgtgtgattcaattgttatcatccgtgatggtagtgtgattgagagcggcaatcttgatcaattacggcatctatcgcggatcaaaattgaagtcaccaccgctaccccaatgactgctttggcaaagcaagctggcgttcacgacctcacttatcgcgattccgagcacaccaaggcggttttcaccgctgatcgagacgcgcttggcaccatcatgaccacactggccgccaacaccgtggtcgacatgcaatcaacgccgccaacgctggaagatttattcctgcgttattatggaaagcaaggtgagactcatgcggcacagtaatcggaacgcaggttatctgcttcgggcaaacctcaaacaaaatctaaaattttcactcatctggcttgtcattttgatcatgatgattgccagtggtgctggcaaattggaagcagcctttgcaggcggggcctcgggctctaaagagattgtcaaaatgctgcaagcgccgggcatggcggcaatgtttggcgcgatgccaaaggtggacacgtataacacagcgattgtgtttgctggtgtgatggtcgtcttcatgattattttgcaggccttatgggttatgccgctgatgattcgcaacacccgcggtcaagaagaaagtggcttgctcgaaatggttcgcgctcgcaatgttgggcgaacggctgccatcaccgccgcttcgcttgagcttctcatcgacagtgccataatgggtatcctctattttgtctcgttggccgctgtcaacatgggtggtactgacttgtacggtgacttcctgttttcactggggatggtgatcgccaacttgctattcggagccattgcgttgctattcgcgcaactaaccaataacacacgtacagccaatatgttgagctacatggtgctgactgccgcttatttggttcggctggtcaccgatatccagcatcaaaatctgacgtggttatcaccaattggttggttcgaaaaagcaaacttctatactgataacaacgtctgggctttaggtttggccttactggtcagcattctgcttgcggccagcgccaccatgattgcccgcaaccgcgatctgggcgccgggattattgctgaacgcaccggccgagccaaagctgccggctggcttcgctcgatccctgccttactgtggcgaactgagcgcggattatttgctgggtggttaatcggcgccgtggtgtttggcggcgtcatgggtagtgtgctcggcggcgttggcgacattcttaaaacgaatccgctttatcgtaaaatactagatgttggccaaatcaacgctgccaatcagaccatggtcctgtcattcttaggcatgtatctcggcattttcgtcgcattagccgtgactgctggcgtccaagtggcattccgactcaaacgcgatgacaaccttggttacttgagcgtcattcatgccgaaaagccaacgcgaaccacgatcagtgtcagctactattgctttggtctgctggcaggcgtgttcgtcctttctgctgggctgctggccttgttcttcactgggaacactgttctcagtcacccgttgccgctcaagtacctcggtcgcctattcgtggctagcgttccggctgtgatatcgtttatcgcccttggcatcgcactagtcggtctgtggccacgcttaagcagtctattctggctgtatatgggagccggtctgatcgttcaaattttccggggattgtttgatttgccaaaacacgcaggcaacttcacaccttttggctggattgccaatgtaccggttgaaaacgttgatcaaacatggctaatcgtgatggttgttagcgctatagtattatttattcttggcattgctggttatcgccgtcaggatttgagcctatgaaaaatgttgtgacagatcctgaaaaggtcacccgaatcctcaaaacagcgacggaaattttcggccagcaaggcttcatcaagagcaaaaccgatcagattgccaaccaagcacaagtatctaagggcttgctcttccattattttggcaataaacaagcgctgtatcttgacgctttcaaatatgcctatcatcgaatttatgatcacatggaccccaaaaagtggcagaatgcccctggcttggctgccatgatgaccactgcagttaagtatgagttgaaactacaattcaaattcccagctgaataccgcttgatgatgcaagcctatgctgatttaccgcattttcccgaaccgttgcgacaacaagtgcagcaagaaacaactgccatatccgctgaaaccgatcgcatttttcgcgagaaaattgaacagctgcctcgtcgtgagggcctgtcagtcgatgacgttttcggtgtcgtttctgccttaatcgcccaacaaacggcggtcaccaccagactcattgccagtggccattatcgcaagtttgaagatctgcagtccgtggttgagacgatggcacgccagttattgattgtcgaacacggctttttaccagatgaaagttgacgtcagctgatagatcaaaaaaggtcattagggtataccctattggccgtttttatttttgtgctatactaggaaatacagatgttcattagaactgtccaaaaaggagcggcaaaatggcaactattggttatgcgcgcgttagttccaaagaacagcatttagatcgtcaattaaatgctttaaagaatgttgataagcttttcactgataaattaagtggtgcaactaccaatcgacccgagttgcaaaagatgttggcctatatccgtgaaggggatattgttttggtcactgaattagatcgattaggcagaaataatcaagacctaaccaaaatcatgaatagcattcaggataagggagctacattagatgtgttaaatttaccatcgatgaccggcatctctgatccgaacttgcgccaactgatgactaacctcattattgaattgtataagtaccaagccgaaagcgaacgtaaacgaattattgaacgtcaacaacaaggcattgccctcgctaaacagcagggcaaataccatggccgtaaagcacaatataaccaagatgatccccgcttacaacatgcctttaaactatatcaagccggtatgagtgatgtggacgtggcccgcaataccggtataaagcggacaacttttattcgttatcgaaagaaatttaagattgtgagaggtggagtacatgaagccacataaaattatcctcacttgttttgcgcttcttgttttgggagtgtgtagcctagtaataaacacctcggctaacgcagcaatctgccataacggcggccgggcggactaccgaggattgattaaatacactaaggcggccaaacgggctaagtcccacgttgagtgtgatacgattttgatagatcaagacagtgccagcgatactttcccggttaacgacatcgaaacgagcgacggtacgattgaacacgaggctcacgtttcgaaaatctctgaagcccaactgtactacttgaaaagtcggggattagacgaagcgaccgcctcccaattgattattatgggatttttggagcccttcactaagcaattgcccatggaatacgccgtggaattagaccggttgattaagtttcagatggagggcagcatcggctaaagctgtgaaatttgcgaacgttatgcaaaattttgcccaataaaaagaacggcgaattaacgccgttcttaaacgattgataataaaattaaattagaaaacatttttaaatttcgctaaagcacttgacaaattaacttggataatgtaaaaatatagttgttaaaagtataagtaaactttgataatgaagtggtgcatattgaaagaaacgaattatgtcgaaaataaagtctatgaataccgagtactccaacatctttctcaagaaaaattaggtcaagcggttggtgtttccaagcaaaccatctatgcaatggaaaaaggcaactactcacctagtttgattttagcctttaagctcgcacgattttttgatgtaccaattgacgttctattcacttatcgggaggcgtaacaatatggcccctactacactttttaaatcaaaatgcccatgtaatcgctggtgtggcaatcggattaatcatcatttcaattctgtttttctactatggtataactagaattggacgttcggatgaacgctcacagcttattatgtatcgcgtttttaaaacgatgtttgcagcgtgtttattatcgatgattttatttatgacttttgtgccagaccgcttaacagcagttcgagattggtttacaactctattcagtcttgtatttatcagtggcgcatgcgctgtttttattgaaccacggcgtaaagtttaacccttaaaaaaaaacggtttagtcaatctaatgactaaaccgtttttttaatatgttgtttttcgtccttttggaattaaataataaaagataccgattaagatgagatcaatgatcatcaatccaataaaaatcgctgttcgacccgttaggtaaaagaaccaactaccaattgagaagccaatgattgagctaacaactaggtgcagcgcaaaaatttgggtttgtgccacgcggaatttacgatataaaccagtgctgagccctttttgtgcgtgataaccattgataacttggctaaataaataagtgaaaccgaccgcgatgatcatgaggacggcaattaccgcgattacacccgcattttgacggagccagttgacgccgactaacggcgtcgtcttcggtgttaaataactgtgcttagtcgttttgaaaatcttttggtaagttttcagatgcgctcccatctgcggaccatcaaccaatacggtgactttattcagtgggcgatcatttaatacaaattctggtgacgtggatacaaaaatgtgctgatcaagcgtagttgtctgattcgtaccgacaacgccaatcacggataagtagcgaccatgatcttgataatacgcttgactagctggtttgtagagttcagcaagtcgtgattgaccagcaacgacgactggaatctgtgatttgaaatcgtaactggagaagaaccggccgtcttttaatgggacactcgataacttccctttcgcatagacatatgagaaccgggaatcaacgttgaattgaatttgaaaatggcttaatttcgcggcatcaattttttgaatggttttttgaatcgactgttgactcttagaattaaaaatcacagcattttctgataaactattgtgatttaagcgttggctatagttagtttttgcacgttggctaatcgttaacatgcctagaactgttaaaccaactagtaaacaatctaatattatttttttcaggcgcacagtgggccctcctttaaagcagactattgaatccagtaaaaccgatcacgcattaaatcgaatgggcgtaagtaacggttaatccgtgataaacgggcgtcgttgtgataatgggccgccgtccaaaaggcgtgactattcgtggcgccaaaacgttcgcctaagcacaacaaaacgggggcatttggcattgcacgaagttgttgcagcaattcataatcaactgggacgccgttgggtgaccaggacattaagactgcatcgacttgcggaccatattttgggaccgcttgtttggcgtcaagagctgccactgacgtgactaattggcgccctgtttcattctcggcagtccaggctaaactatcggtacaaatcacatcagcgcctgcctgccgtaaaccagcacttaaatagccgttaccagccatgacttctagaaaacgccaattgggaaactcgcggacaatcgccgccgtcaaatctgtagtgatataggcccacatgccaaagcgattttgcaaatattcacggtaattgcgcagtaagtggtcgattaactgtaactgacgttgaacctcagccacactagcggcgctaaaagccccctgttcagcctggagtaatatttctaaatacagagattcatcaattcccaaaacgggtaaattatgtatgggcaagccgtcctgttcaatctgcaataaactagttaaaacagcatgaatttgtacttgaatggctgggacggttgcaaaaaaacgttgactctggcgcaatttctctggataacttaactgtatcataatggattccgtttctaatataagtttctcttaaacgattagaaaaaccttcccaatcggaaggccaaatcgaacgttttaacgaatcccgagtgcaatgcgtgcataacgggacatcttgctggtatcccacgctgggtaccagacgagattgactttaacttcattgacttctggaattttgcccattgcttgatgaatcgaatccgttaaaacatcggttaagggacagcccatcgttgtaagggtcatatcaatcgtacataagccattttcatccaggtttaaaccgtaaaccaagccgagattcacaatgtcaatcccgagttctggatcaatcacggtctcgagcgcggctagaatccgttcctttaagtcttcaattgctgcatcatcttgtggttggtctgccatgtgtcctgcctcctggtcactctaatagctctattatactggttcaaccgaccagttacaactgacgatcattgacaacaatccgcataccccctagaataaaaagacatatcgtgttttaaccaaacacgtttttaaaaggaggcgccgctatgcatcaaaaattgattgcactggatttagatgggactaccctcaattcagatgcccaaattacacttaaaacgcaacaaactttaactgaattacaaaacgctggccacattgtcagtattgtcacagggcgcccaaatcgtttgagtgaacctttctaccaacaattaggtttaacgtcgccaatggttaactttaatggggctttaatgcacattccgggacaagcctgggccggtgaatatcaatatacgattaataaagacattgtctttagtctcttccaactaaaagaacgctttaagattcaaatgattgccgccgaaggtaaaacgatgtttttagctgatcaagcttatgccaacacgttttctttcttccccacaacgttgaagtccgatgaaattttaacccgcgaatcgcttcggcaagacccagcggccgtcacggtttttgtggaacgcgctgatcaagatgcgttacgtgctgaaattctgcgccaattccctgacgtttccgtcaacacttggggtggtcctgctagcgtcttagaaattgtgcatcatgggattcacaaagcaaccggcctcgcaaaactagcggcacactacgacattgatcaatcagatatcattgcctttggtgatgaaagtaatgatttggatatgttagcctatgccggtaccggggttgcgatgcaaaacgcaattgcaccgatcaaggcgattgcagacgacatcacaccactgacgaatgcgcaagatggtgtggtcaattatttacggcaatattttaagatggattaatgaaaaagcgattcgacaatttctggtcgaatcgctttttttgatggatgaaacgtgcttttcaagctaactttctgtgcttagctacatccgtcaaatcaccgattttgtcggtaatctgcctgattaggctaatcctcagaagatacccggcttattgcacactctattctgaaacgtgctccgtcagatatacacttccggttagttacataccgcaaacgatcggctacgccgctcattcacggtattagactaatcctcagcgtatgaccatctgacgtcgcactctatttttcgtcgctctttagcacgccgcctactgagtagcggtctggttgcatttcgtttaggacaacgtgcacgtgttctgcaggtgcgcctgtgtttttagtgattgcttctgtgacgtctgcacagagttgttttaattgtgcttggctccggccagcgattaaatcgatgtgtactaatggcatgtgtggtgcctcctttaattgaatacttatattatgcctgttttaacgcaattgagcaacggtaattactgtgtttttaagcaaaagaatgtataataatagctaatattgatttatctatggaggcattacaatgagtgaacccctttaccgtcaattgacggcctgtaccagtgttttagttggtaagaaagccactgcagacggctcaactttaatcgcacgtaacgaagatagccaggcagcttggcctaaacatttaaccatccatccccatcaaaagttaacgactgccccgcactttgtctcaaaagacacgggtttttcaatcgatttaccacttgaagccgcaaaatacacggcgacacccgaatggaccgatgaatatggactattcgaagaagacggcattaacgaatacggcgttgcgatgagcggcaccgaaagtgcttatagcaacagtcgcgctctcggctttgacccctacatcgacaacgggattgctgaagaagccatgattacagtcgtcttaccttacgtgaaaacggcccgtgaaggtgttgcgcggctaggcgccatcgttagtgaatacggcaccactgaaagtaacgggattctcttttccgatgtcgatgaggtctggtatcttgaaatcggcagtggacatcactgggttgcccaacggattccggatgatagctatgccgtggttgccaatcaacttgcgattcaagaagtgcaattcgatcaaccggattggttcatgacttcagaggggattcaagattttgcgcgtgataatcacctatggcaagctgatacgccatttaacttccgcgatatctttgggaccaaagaccaaagtgaccttgtttacaacacaccgcgcgtttggtacggtcaaaaattgttaacgccatctgtcacccaacaacctcaagactttaacctccccttcttacgacaagccgatgcgcccattcaagtcgaagatgtcgcgcgaattctaggctcgcattatgaaggcacggtctacgatccaatcggtcacggcacaccacaagaaaaacatgctttccgcccaattagtttagcaaagacgcaagaatcacacattctccaaatgcgccctaacttaccggttgatgttagcggtattcattggttatcaatgggtgtcacggcgcaaagtgtttacgtcccattctatgccggtgccgatgacgtcccagtcaattaccaaaaagggacaaaggattacagtcaagattcgatctactggacctataaattagctggtattttggtggatgcacactacgccaagttcgccaaggacttggaacaaacgcaaaaacacatcaatagtttgatggttcaaaacatcgtggcaactgatcaagcggttgctgctgaaactgatgcacaccaacgaaccctgttgatgaccaaaggttctgctaaggctgcacaactcgcacaacacgaaatggaacgcctcaccgcaaaactgattacggatagcgcgaacctatcaccactcaactttacaacggatagtaatttatagataaaaatggtcccacatcgtattttgatgtgggaccattttatttactcagcaatcatctctctaatcttgtaagttccacttgcgtatctaacttctacccgataaggatgtccatggacaactgatttagaaggagtaaatacatttccatttagggaaccatagtagttttggccattggtgacttctgccagatagctgttgtttcctaatacgactatcttataatgcttaaataattcgttagcaaaggtaacgacgattttattatttttaacactcatgtcagcaactaaagtgttcaagaacagttgctgtgcatggttaattctttgagtcaatatcgtcttttccgagcccttaactgcgttaatttgtgttcgtaattgatctaataggtcttgtgtgacctcagatttcaactgatcgtttgtttcaaataacgcttcaacttgacgtttcagaagaagaatatcctgactaatcattttgagaatgtaagacttgtgcggtaattcagccactacggtaacaacatgtgcatccgcttggttaggaattgttaagacattatcgtcgagctgaccaccactactgataccatttttgacctctgcaactggttggtcgtcaacaagtaccttaattttcgcatagtctttaaacttctcatcagtaaacgataccactaatgctgattgtgaatccagttgaatatctttgactaatgtagctaggtatttgtcttctaattttgtaaatagttctaagagtttttctttatagtcaaaagtagaaggaagagcatcaattcgatttcggagagcatctagtttagcttgggttagaattgtaccaatcggttctgatgcattcaaatagtttaataactcttcttcaagtgcaatactatcaattgagtgttcatatcgtttaaaagtaccatttttattttgctgttcaattgtaatcacatcagtcggtttaagcatctcgattgtttcccaaacattatttgttaacatactttcaattggctctttattgacgagtttggaaatcacttgtccattctttttaaggattaattgctcatccttaaatacatcggtttggtagtcagtcaggttaacttgaataccgtggtcattcagcgatacggtgtcgattaagcgcatgggtaactgtttattagtttctttatcatttaaccaaatagcttctggtaaaggtgctaattgactaatttcagctttaactgctgcggaaatatcaaatccccattgttcgaaataaggctgcatattataacccgtaattctagaaacatttagaacaaagttttgcatccgttcattgtctggtccaaatgcaagcttgttttcacgatagtactgatgtaaaacggggtaaaagttatcaccaaatgtatttcctaattgaccaaacataaccatctttaaattattattttgtgcgttgaattgcttattatcagattttagataagtatgcatttctgggtagtattgatctaacgatgtcattttaccagtcaattctttttgagccgctaatgcataaatgttaacacttgattctacaacagcaccccatttccaaggtgtttgttgtctctgatgaccactttcatgccagatgctccaaccttcatttgtcttcagtagtcgttgcaaagcgcgatcattatggaagcccataaattcattttctgtatacatatacaacttaggtgactctaagaaatgttggagatggcgatcaacaaagtttactggatttccttcagtagtaatgcctgaaacccgatcttgtgccgttaaaaaccgatcataataggtcatcagttctttagggtcaccgagatattttttagccattgcgtaactaactgtaattaatgctttgttactgaccaactgcacatctttagcattcgtcatttccgccatttgtttctcaaagtctgcgacgctagtttgatttaaatcgaaatatggcattgatcctgttgcccctgatattgtgattgttgcttcaccagaatcattaggattagtcacataaatcgggccctcgttttcaacggtaatcgttgtaatgccctttgttaatggatattgtttttgattttctcgttcgggcgaaccaattgtgatagataatgaatcttgcatcccctgagcaactgtcaaaacatcccctttttgggcgtataaaccgctaggctctaaacttgagtagcgtaatgttctgcgttgccggtctttttctttaaaaacatcaccacgaccaatataggttttcatttcttgtggtgcttttagattttgctggtgcctcaccttggatttgaggctatctgctagcacgctactcgctaaattttggtgattgtcacttggttcagccttaactgtttgtatagaactgatggtgctagttgttaggattcctaacgctaaaattccgattacattcttgatagtctcatcccctaaaagtattattatttttataacatattcagattagcatggactgctgaaaattgtctattaaaaaaccctaatgatttctataattattctattaatattaaaaatgtcaataatgataactacaactattacatttaagaataaatcgctctataattgtgatgacagtgtttacaattgtgtaaaataaaataagacccaccacttattaagtgatgggtcttattttattcagttataaatgtattataatgaacacccttattaaagtaattccgctaccaatggccaattgatcatcttccaaaagttttcgatgtaatcaatccggttattctggtatttcaggtagtacgcatgttcccaaacgtcaagtccaagtagtggtcgattacgactcataagtggtgaatcttgattaggcgttgtcatgatttgtagttcaccattttgatcgataacaagccatgcccagccagagccaaatacaccaagggcagcttcggtgaatgcttcttggaacgtcttaaacttcccaaagcgggcttcaatccgttcgagtaattcccccgttggtgcttctggcgcattcggtgttagaattcgccagaagaaactatgattggcatggcccccagcattattgcggacaggtgcttgaagattctcaggtaaatcatcgatgtgtgttaacaaatcatgtaatgatttacctgctaaatcggggtgcttggctagcgccgcgttgagttttgttacataagtcttatgatgtttgtcatgatgcagatgcattgtttcagaatcgatatacggctctaaggccacatattcataaggtagtgctggtaatttaaatgtcattgttcaccctccttgttataacctcatcatacaagtctatggcgttaaaaagcgaataatatgattctacgaccattgaaaaaagctgactaatgtttattagccaactttttttgaatcctgggtagctgcgtatcgatttctgccaacatcatgttcggtgtcttatgttggaaaaaaatggtgtagtccgcaagccgataatactttggtcgtcgtttgtgatacagttcgcgtaaaccatcgtggcccaattgattcacaagtggccgccgatcattgcgcgaaacgcggcgccaatgtgcttcataactcccatttaggaaaaaaatggggatatgactctgttcaagtaaatggcgcgtctgagcatcatccacgaccccgccgccggttgcgataatcccatcgtgttggatcaatgtctgtaaggcctcaaattccatttgtcgaaatgcagcctgccctttttcggcaaagatttcgttaatcgtcatttgctgttcttgcatgatgtagcgatccaaatcaatccagtcacaatggtaatgatgtgcaactttgcgtgcaatggtcgttttaccagaccccataaaaccgattaaaatcagttgcatctagtcaatcaacccctatggttctatttcaaatatattgttggttccaagactgctccgcacatacggtcagttaaacactctttacaagttagtttcattgtaaggtatctgtgggttggttaccagtttttttttgaaaatagattagccgctaaagtcgttagtggtatggattgaatttttggaacaccaattgcatcgaggtaaacaagattaatggcatctccttgattcttcttatcatgtaaaagttgcgtgaagagtcgatcactcataagtaacgggctatctgtcggcaagccgaccgcatttaaaacagttgtaatcactggtgttaaatgcgcttcagtcagtccactttgttcgactaagtgctgcatggcaactaacccgatgctgaccgcttcaccgtgcatcaggctgccattggccagggtttcaaccgcgtggccaatcgtatgaccgtaatttaataattggcgttgattactttctttttcatcggccatgacaatctgtgccttgtagtgcacactttgctgaattagtgtttcagcctgcgctagaatcatatgcgcactttgaatccctgttacctgttgccaaaatgtcccaccgttgagtgcagccactttaacgatttccgcataaccggccagtaattggcgttgatccagcgacgttaaaaagtcgggatcaatcaatactaaatccggctggtaaaaagaaccaactaagttcttgccagctggtaaatcaagtgcagtctttccaccgacactactgtcaacttgtgccaaaagcgaggttggcatctgaataaatgcaatcccccgcatataggtggacgcgataaaccccgccaaatcaccgacaaccccaccacctaaagcaatcaccccgtcatgacgggtaaaattcgccgctgccagttgggaataaagtgccattgcttggtcaagtgatttcgacgtttcaccagccggaataataatcggtgtgacttgatagccaacttggattaattgagattcgaccgtttctaaatacaacggggcaacattcgtgtctgtgattaatgcgatttgacgaggtgtccaaacttgcgcgatttgttcagcacagatgtgatacaaaccagattggatccgaatctgataatttttttgtgtgaggtggacatcaattatcaccattagtgccgccactgtttgacgactgcatcaacggcccacacttgatgacacatttcaagataagtagctggctttaaggcttgtgcgccatcagaaaaggctttttctggatgatcatgaatctcaacttgtaacccacttgccccagttgcgactccagcccgagccattggcgtcacaagatcccattcaccagtcgcatgactcggatcaattaagactggatagtgcgttaatttttgtaaaactgggacagcatttaaatcaaatgtgttgcgcgtatagtgattgtcaaacgtccgaatcccgcgctctaacagcataatttgttgattaccgttggcagcaatgtactcggcagcatttaataaatcatcaacagttgctgctaagccacgttttaaagcaacgggaacgttggtttttccaacagctttcaataatgaaaagttttgcatattgcgcgccccgatttgaaaaatatcggtatattgcgccactaaatcaacatgcgtttcatccatcacttcggtcacaacgtccatttgataagcatcagcagccttgcgcaatgctttcaaaccagcttcgcccatcccttgaaaggaatacggtgatgtccgcggtttatacgcgccaccccgcaaaatagtcgcaccgccttctttagcaactttggccatcgccataatgtggtcagcagattcgaccgaacaaggacccgccatcaccgtgaagtctgcaccgccaatcgtactgtgtgctaattcgatgaccgtgttttcgggttggaatagccgactgccaagcacgtaactcggttcatccgtggtggttgccgcaatgacttcttcctctgcttgggtaaaatcaattgcttttgcaccgatcaccgctacatggtgcttaatctgatagacattcggatttgtcgtgcgttgtcgtgcgcaaaaatcatcaatcagcgctgaatcagtatttggtttaaattgaataatcataaattattaaaactccttcgttaaagcatgatagatgggatcggtttgtaggacctggcccgtccagaattgaaaactcaacgcggcctgttcaactaacatgccaagcccgttttgggttggatgaccacttcgagccgctaactgtaaaaaagcagtctgacgtggcgcatatattaagtcggcaactaaacaagtcatcggtatttgaccaattaaaggtgctgccagcggtaatccaggggtattgaccatgccaagattcgtggcgttaatcacgcaatcagcattactgagtgcttgttggagtgcctgttcatcggcataattatgtagcacgatggacatcgaatggtgattagcaatttttgccagtcgttgttcaaccaccgcataagtcgtattttgacgtttgaagacctgaatcgtcgccacaccatagcgagcggcggcttcgataaccgcgagagcagcgcccccaccacccagaataacaatctgctgactagctagattgggatatcttttctgcaaagcgcgccaaaaaccatcgccatcagtattcgtgcctaccaatttacccgatcgtaaagcaaccgtattgatggcgccaacgagttgcgcagttggcattaactcgtccattaatggcacaagcgactgtttatagggcattgaaagattaacgcctgccacaccaagcgtccgaatcgcttttgcgacatcttgcggccgtgcttggctatcgaaaaccagataccgcgcgtcgatttgatgttgtttaaaacccagattatgaatcatgggtgacaagctatggtgcgctggatgcgcaaccaagccgtaaagagctgtataacctgatatcattacattttcctctaaaactatcatactttacttaatgagatttttaaatggttagtatcaaaaagtcatgcttaatactgttattttttgtcattatccggtaagattaacatagattgaaaacggttaatataatagaaagaggtccttaataatgtcgatcgaacgtcaaacgttatccgttaaagaacaagcatttatagttgatgcatattggttaacacccattccagatttcgagcatccagttaaacatcccgtcatgattatttgtccaggcggtggttttacgtatcattcaggtcgtgaaacaacaccggtcgcgttgcgatttttagcagaagggtttcacgtgattgttctcccctaccaattaataagttcgactgaaaccgtttatccgctcgctttacatcagcttgctaagacaattgagtgggtgactgatcaagctggagaatatgatattgatttggatcgaattgttttgactggtttttcagctggtggacatgtggtcgctacctataatggcattgcgaccgatccaatccaccgagctgattacgggttagacgattaccgtggtcatcatgcagcgattgtcttaaattatcctgtgattgattttgacgctggttttccaattgatgatgcaactaagcaacagattacagtggaccaaactttatggcacgcacaaaaaaatatcacagcagcagctaaaccagcttttatttggcaaacagccacagacgcccttgttccagcaacgaattcacttctatatacacttgcattacagcaacataaaatccctgttgaataccatctctttggagctggtgttcatggcctttcgcttgctaatcatgtgactcaaacaccaggcaaaccagaatatgctaatactgtagcagctcagtgggtcccacttgtattggactggtttaaactgatggcaattttataagaacctaaaaagcaatggatacagtaatattaactgcatccattgcttttttgcttatttacggtctgccttattagcaatacctaattcttgacgatatttagcgacggttcttctagcaactttaatgtcatacttaacttttaactggtccgcgattttttgatcagacaatggatgatgggcttcttcttccttaacaactgtttgaattgcaatgtgcgtctgtgtcaaggtgggaccttcctctaaagttgtactccgtttggtcaacaaattccgcagaagatagataccattaggcgtccgaattgatttttctttaatcgttcggctaattgttgattcactgagctgcaattgatttgcgatatcccgtagaatcaattgattaggatatgcttgttttccagtaatataatcccactgtgccttgattaggacttcagcaaccattaataatgtttgcccgcgcttatgcaaactcgtgtttaacatctgatacttggcatatttttgctgaatgtattgtttggtagcgacatcgacttctttttggaactgcgcgtaacttgcatgttcaaaaatcagcgttggtcgcccaaattcagtcaatagtagctgatatcgtgagccattcatcttaataatgacatctggcacttgaaaattagttggtgagtcatcaaacatatttcctggttcaagactcagtgcacctattttgtgtaaaatcgattgcatgtcatcttgactaatggctaactgagtttgaatttgtttaatatcaccagctaataattgttcaaaataatcagttatcaccaaaatactaagatcatcagccggataaatagcagaggcctgtagtaataacacttcttgtgcatcacgaccaccaaccccgattggatcaagttgttgtagtaacgtcacaacgtcttgataagtggtctgatcaatttgattttcttggataaaacgggcttcatccacctttaaatagccatttggttcaacctccaaaatcagccgttgcaaaagttgctgtaatttacctgctttaaaccgataaccgacttgttccaacaaataatcgtataaattacctgttccgtgagccgctagctgatcaaaattgaattcttttgtacaggcttcgacggacccgacctcaaacaaggggttctctaaactacgagcttttaaataatccagtaggtcgagactattagattgcaaaatttttaaggattgttgcaatgattccaatgaatattttaatagacggttacgctggttcttcccgaaaaagaccaattttagccaagtaacgactgatgagatcctagcagcacttgaactaattaatcaacgaccattaaaaatacatcatcaacagactgccattgaaagattccgggcttgttcggattaaacttgtaatttgccggatcaaacaaatattttttatcgacgagatattggtaagaactccatttagttcaaaaaggtagaagtaagacttcgtttgaaatattacttctacctttttatttggatcgacatcttagaactttgagtttttgaaaaatttatagacatagatatttagagtattttttattagtcattgaaactattgaaaatagcgttgcatagaacaggaaagaaaggtatgatttaagaaattggtaatcttattggaccagttaataaaaataagtggttttctaattttaaaatgttgatctaacagtcttttcttagtgtactccccatgtatatggggatgattcctgctgtccctgaaacttttgccaatttagatggtactccccatgtatatggggatgattccctaactgtccatcggaaattacttgattcatagtactccccatgtatatggggatgattctattcaaaaacgtaccattgatttagtagatcggtactccccatgtatatggggatgattccaatatttgtgtctgggatttcgttgccgttcagtactccccatgtatatggggatgattccgttgcaatgcttaaaacatcgtaagtgtgtcagtactccccatgtatatggggatgattcttaactgatacaatcgcagatatcaactatgttgtactccccatgtatatggggatgattcctgtaaacaagcgcggttcttataaaactgatagtactccccatgtatatggggatgattccacgttttatggttatcgggtgtaataacccacgtactccccatgtatatggggatgattcctgacgagaacattgctaatggattgtaacctggtactccccatgtatatggggatgattctaataaagccgactaccatatcaatcagtggcagtactccccatgtatatggggatgattctcaaattagggttcttaaccaagattttagacagtactccccatgtatatggggatgattcttaaacagcaagtttgaagtgataattaacactgtactccccatgtatatggggatgattctggcgagtccatcgaatttgaaagcgcgaagaagtactccccatgtatatggggatgattctgtcatgcttaattcctccaatttaattaattcgtactccccatgtatatggggatgattcttgttcatacttcatttctgatttaactaagcggtactccccatgtatatggggatgattcttgatattataactacaatctaataataagatagtactccccatgtatatggggatgattccgttagttatcatggtgggtggtacattataatgtactccccatgtatatggggatgattccggcaaggaattcgcaacagcaatcaaaacaaggtactccccatgtatatggggatgattctcgtaaaaacgttcccgtctattgctgaaatgagtactccccatgtatatggggatgattctatcgaacaaccttcgtcaaggttaccaacacagtactccccatgtatatggggatgattctatttttaccgtcctttttagttataattttgggtactccccatgtatatggggatgattccagcgttacattgtatgtaccaaaagagaataagtactccccatgtatatggggatgattccaaatataaagcgttataagggattgtgagttggtactccccatgtatatggggatgattctagtctaatgataatatatatctaatcaataaggtactccccatgtatatggggatgattccaaaacggcaacaacggctcagaccctagcgcagtactccccatgtatatggggatgattccaatattacaattcgataatattcatttatatagtactccccatgtatatggggatgattctgccattccagacgcttgatgtggcagacttaagtactccccatgtatatggggatgattctgggctcgtgtggctcgatgataaccagataacgtactccccatgtatatggggatgattctaaaaggtgatccagttccagcagaacggccgagtactccccatgtatatggggatgattctcagaccagcagactccatcagtcaatcagaccgtactccccatgtatatggggatgattctggtactttgacacgtattacaaaactgacaatgtactccccatgtatatggggatgattccttaattagtttagtgcgaccgcgactagccttgtactccccatgtatatggggatgattccttatcagacacattaatgccaatacctaactggtactccccatgtatatggggatgattctaagcgtggcgcaattccacgcccaccatttcagtactccccatgtatatggggatgattcttgtccactagtgataacagcatggttgtccgtgtactccccatgtatatggggatgattctattcatcgcaaaaattcaataatgcttttaaggtgttccccatatacatgggatggttttaattagggccaagtgctcttttttatcataattttttcagaagtgaaattgtaccgtaaatagatttagtcatgagctaatttgtaatgaggttagatattagaaagtaaattttcatttcttacaagtctaactatattaatagtggcataataaagataacgattacattgccgtttgcgtagatacatttgaaagataatctctctaaaaaggggaaatattaaatgtcagtaaaattaacgagtagagaaactagtttatgggcaaaaaaacatgtagatgatggggaaatgttgtggcttccattagttgcccacttagtagattgcagtcatgtgatgaattggcttttttatcattggttaaatgccggtcaaagagaattgttaactcagtcggtttctgaagaagacatgcaaaagctaattaaatttttgggattctttcatgatattgggaaagccacaccagcttttcaaacaaaaaaatcttacgataataatgcctcgcttgatgaagagttgattgaacgcttgaatcgaaatggtttttctgaattacgagtatctggattatcatctccacaaaaatcacctcatgcattagctggagaagcaatcttagaaagtgatgcatttaatattcctgcttccgtaggggctatcattggaggtcatcatggtaaaccggctgaaaaacataatctcagaattcaattggaaaattatactgccaactacgatcaagttgatgggcatgttaaagatcctattgaggaagaacgtcgacaggaagaaaaacaagcttggcaagatactcgacaacggttatttgattatggaatgaatttagctggatatactgaggctggtgaaattccagaggttggacaaccacaggcagttatcttagaaggacttctgattatggcagattggctatcttcaagtgagtggttgaatgaagatcgatctaaacctctgtttccactaattgggcttgatcaaggttatcaagacatagatatgacaagtcgatttgagaatgccattttaacgtggaagcaatcagacaaatgggttccacaaagggtgatactgaatgataatactaatccatattttaatcattggggatatactccacgcccggttcaattagctatgactcaagcaattcaggctacaactgatcccggacttgtaattgttgaagcgggtatgggccttggaaaaacagaaatatctttaattgcagcggaacaacttgcgtataaaactggcagaaatggattttttatggggttgccaacgcaagcaacaaccaatgctatgtttacgcgagtgcttgagtggacaaaatttttggctgatgatgaaggaaaaaaattacaaattgatttgatgcagagtaaacgacaatataattcagaattcactaatttgccagaggctagcaatatttatgagcagagtgaaaatggcaagcaacatcaaactggatcagtggttgttaacagttggtttacaggtaaaaaatcaattctgacagattttacagtaggaactattgataatctattacgtatgggactaaaaaagaagcatctttttttacgtcatcttggattcagtggaaaagttgtcgttattgatgaggtacatgcgtatgatacatatatgtctagttatctctttaaagctatgaactggttaggagcttatcatgtgccggtaattattctctctgcaactttgccagttgaaaaacgaaatcagctggttaaagcgtacttaaaaggaaaatatggtttaaactatcagaatcgattaattgttaaagatggatggaagacaacgcaagcttatccgttactgacaattttggacggacctgaattaaaacaactaactaaatttgatcagaagaatcaaaaatctactcatttgcatgtacaacgtttaaacgtgaatgatgaagaattggttcaagcagttacagataaaataaaacagggcggagtagctggtattattgtcaatactgttaaaagagcacaagttcttgccaaagcatttcagcagaatcaaactatgggcgatactcccttgatggtattgcactccgcattcttagcacctgaaaggtctaagcaagaggaaaaattgcaaagacttattggtaaagacggtcatcgcccacacaaaatgattgtgattggaactcaagtattggaacagtcgcttgatattgattttgatgttttatatacggatattgctcccattgatttgattttacaacgtgctggtcgtttacatcggcatgatattcaaagacctgaaactttgaatattccagaattatttgttatgggaattcaagccccatatgaatatggcgatgctaatgaagctatttatgaaaagtatcttttgatgaagactgactattttttgcaagatacggtaactctaccgaacgatatttccaagttagtacaggaagtatacgatccaaaaacggatgatttaattccagaaatcggagaatcgagaattaagttagataaagatcaagcacaagaaaaacagcgttcaaatgttttccaaattgcggcaccaaaatttagacttaaatcgactattcatggttggttagattatgatttccgtaatttaaataaagatgaacaaagtgctaatgcggcggtaagagatattcaagaaacggttgaggttatcttgatacaatgtacagcaaaaggacaatatttagtggatggacggtcattaagagacgtttcagatcgtgaaatatctgaacaagtaattcgtctaccaatggccattacgcctaatgctaccgtgattactaaagttataaatgatctagaagataaaactgcagaatactttgataaatggcaagagagcccatggttaagtggggccttggcattgccgttggatgataatttatcagcaactcttggcaactggcgattaatgtattcagaagatttaggattaaattatacaaaggaggatgagtaaatatgatgagtcagagctttaatttgacaacagatccttggattaaagtgatacagactgatacaggacgggagaagtctgtatcactgattgaattttttagtcatgcacaagactatcgtcaattggccggagaaatgcgctcacaggatttagcaattatgcgttttttgttagcaattttgactacagtatattcgcgttataatgctggcaatatgccatattcttggattaccgtggattctgacacaatgcaagcaacagatgttgatgatgatacagatgctgaggatattaatgaagatttactcgatacgtggaacaaactctatcgagcaggaaaattttctaaaattgtgacagattatttgaagtgttacgataatcgctttgatatgtttggtgatcatcccttttatcaagtgacgaccgctgactatgacgctctagttcctagtaataaacgagtcgaaaaaggaaaaggtcaggtactagttaaacaacttaatcgacgtatttcggaaagtgggaatacgccatcaatttttgctccaaaaacgggcgaacggaagaattcaattgatattgatgaacttgtgcgttggttgattacttatcaaaactttacaggtgtaactgacaaaaccaaaattgagacgaaagaaaagttttccaattctgcgggttggttgtatcggatcaatccagtttatgcccaaggacagactgtatttgaaactctaatgttgaatctgaaattaggtggtgaacaagtagacccgttagccttacaaaagccagtttgggagtatgagattcaagattacattgctgttcgtaaacaacaggtggtaccggataatctagcagagctttatacaacttggtcacgaattcttcatattgaatggcaagataataagcatccattaatttttagtgcagggattccaatttttgaagctacgggtgcttttattgagccaatgacaacgtggagagtagacaaaaaaacaggggaatatcgtcctgctgttaagagtcttcgctcgttgagtatttctatgtggagaaactttggtaattacgttgatgttcacagcaattcaggacaattggaacctggaattgttagttggttgcatgatataaaagatcaagatacatcagtcattgcagatgatcaattgttaacattagcttcaacaactctgatcagcgatggtaatgcgacctcacaggctccagcggttgaagtagccgatgatatacgattacaatcagacgtgttgtttgatcctgaaattgcggaatattggcctgtacgaattgaagatgctatagatacaactcaaatgattggaacagatttttaccattttgcttcaacaattggtcaaatacgtaatgtggatgcgcgttcatttgccagcaatttaagtgccagtttttatcagaaattgaatgctccatttaaagaatggctatcccaattgactggtgatgatgacagagaacaaaaaattgaacaatggaaagagcaattagaagatattttaaatgacacagttcgtgatgtcatgaagtctagttctcctagggacgtcagtggtattgaggatgataaaggccgtttgttgaatatttttaccgctcgaagaagactaaattataatgttcgcatacatttagggcctcaggataaggagtgatatatcgttatgggaaaaatagaaaaggttaccgatagaataattcggagtctttggagagatggaaaaccagacaaagctgttttatcaaatgttcgaggtgctgctacgctgttaagtcggcaagcacagtctgtttggccagtgatgatggctaatctggatgaaaagatgttaagtcgcgatggtcgtcccacttatgcggaaacggcagtatatgcagccattcgtttttatgcgattcatcaacaaggacaaacacaatttgtttacagttcagttcacggggatgatgagaataaaggagtgagtttatttaaagcgcttgctcagttaagaaatcaaccagatcgtcaagaagctctggatcgtcgagtgaaagcactcttggcaacaagtaatgtggctagtatgattcagtctttatctcatttggttagtattttaaaagccactaatccaacaattagaattgattatgccttattagcacaagatttatatgatgcacaatttggtgttgatgttgcgaaccaagttcatttgcgctgggggcagcagtactattggagcacgaaaaatcagaaaacaactgaaggggagaaaaactaatgaccaataatttatatttagacataaatatcattcaaactgttccatcatctaatttaaatcgagatgatacaggagcacctaagaccgctttgtatggtggtgttacgagagctcgagtttcttcacaaagttggaaacacgtcgtacgccatgcatttaaggaagatcatgtgacatttagttcacgaacaaaagagtctgttcaattattggctaatgagttacgtaagcaagatggttctcttgatgaagaagctgctttaaccaaagctaatgaagcttttaaatcagctggcatcaaggttgacaaaaataatgagacgggtgctttacttttaattagtaatggtcaaattaaaaaattggctcagtatatactcaataatgatgaactcgataaaaaagaaattaaaaaagttcttaagggagaccaatccctcgatttagctttatttggtcgaatggtagctgataatcctgaattaaatgttgatgccgcctcacaagttgctcatgcaatttcaactcatgaagtgattcctgaatatgattactttactgccttagatgatgaacaaggtgaagatactagtggagccgctatgttaggaactattgagtttaattcggccacactatatcggtatgctaacgtgaatgtcaatgaattagtacataatctgaataaagaagatgccatcgctggtatatctgcttttatcaaagattttgccctatcaatgccaactggaaaacagaatacttttgcaaacaaaacgcttccaaactatgtcatggttacgattcgacaagatacacctgtcaatttagtttcggcattcgaaaaaccagttgtatctaacgatggttatgttgaaaaatctgttgaacgaatagagaacgagtataagcagacactggattttgtagatcaaccgttattgacggtagctttgagtaaatacagtacagaagctagcaagacagcaacaaacttgtctgatctcttggaacaggttacgacggagttgacgaaggtggttgaggatgaaaatactaacgattagattgacgtcgcctttacaatcctatggtgatgaggctacgtttgaacggcggacaaccggagattatccttcaaaaagttcaattattggaatgattgcagcggctttgggttattcaagagaggatccacgaatctcgcaattgaatgatttgaattttgctgtacgaattgaccaagctggacaaatgttaactgattttcatactgttgaatggaaaaagaatgttcgcaaaattacttatcgcgattacatacaagatgcagtatttgtagttgccgtgggaagtaatgatgatcaacaaattacaaaaattcacaatgcactgcgtcatccgcattatcagttattcttggggcgtcgagctaatgttccagcaggagttcttctaatggaagaacttgacgataaaaaccctgtaacagttctggaaaatttaggttggcaagtttcaccttggtctcaaaaagtttatcgaaaacaaaatcctggtaaaatgtttcccaaagttgatatatatgcagatgcaaatttacttaacgatcatcatagtgtaatggttaaagatcgagtgggttcatttgatcaaagaaatcgatactttggttatcgagcaatgtcaacagaacgagttcaactgacatattcttgtatagcagttgatgaatcaacagaacatgatgcattaagtgcactttagaaaggggggtagtctatgtattatttatcaagagttgaagttgatgttcaaaatcgtgcaaaaatcaaagatcttactcatttaggtgcatatcataactgggttgagcagagctttccaaaggaaatagcgaccggagaacgtcatagacatttgtggcgtttggatacattagcggggaaaaagtatttattgatcatgagtgaatccatacctgattctgagtttttattgaaatatggtgttacaggaactattgtgactaaatcatacgatggattcttagacaaaattcatgatggtcagattatgcgtttccgattgacggctaatcccacacatacgattacacgtcctggaaaaaaacgtgggaaagttttccctcatgttacagttactcaacaggaaaaatggttggtagatcgatcagataagtctggatttgaattggtcaaacaagttggtgttaatgacttaaatgaaacgcagacgctcgcttttaaaattgtcgaacgtgattggccaatgttacaccgtaatccaggacgagccgttcgtctcagtcgagtaacgtttgaaggtctgttacgcgttgaaaatgcagagacttttaaacagactttagtaaagggaattggacgtgagaaagcttttggtatgggaatgatgactgttattccggaggcttaatatgtcagaaagaaaaatgggtgctaataagccagaaatttctgaacttggtcgtgtacaagatcgtatgacctttttatatttagaacatgctgatgttaataggcaggatagtgctattcaagtgacggatcaacgtggaattgtatgtattccagctgctatggtgagtgtcttattgttgggccctggggttaatgtaactcatagagctatggaattaattggagattcagctatggctgtagtctgggttggtgagcaaggagtacgtgcatatgctcatggtcgcgctttgaaccactcatcacgtttattacaagcacaagcaaaattagtttcgaatcaacgtactagagttgctgttgcgcgtaagatgtatcagatgcgctttcctgatcaagatgtttcggggttgtctatgcaagaacttcgtggcaaagaaggtgctagagttcgaagtgtttatcacaaagaatcaagaaaaacaaatgtaccctggaatcgtcgtgagtataatccagataattttgagtcgggtacaccaattaatcaagctttgactgcagcacatcaagcactttacggattgagttatagtgtaattgtggcgttaggggcatcaccaggcttgggatttgtacatacaggtcacgatttatcttttgtttacgattttgcagatttgtataaagcaaaaatctctattcctgttgcattcgaaatgactgcaaaatatagtcaagacgaagatctagcagctagaacacgattagctatgcgagatgcctttcgagacggtaaactattgtctcagatggtgactgatttgaaaaatctattaaacatagatgattgtcaagatggcgcagatttatttcaactttgggatgataaacttggtatgcagaaaatgggagttcagtatcatgatgtaacggcaggtgatgacgaatgattgttgttactttatctaaagttccgccttcacttcgtggtgacttgactaaatggtatcaggagattcaaacaggtgtgtatgtaggtaatgtcagtgcacgagtccgtgacctactctgggaacgtattttgaaaaatattgggactggtgaagcaacaatggcgtataatactgccactgaattaggctatcagtttcggacaacacgtaaggatcgacaagtggtcgattatgatggtatacccttaatgatgcatttaaagcaacaagaggtgccagttaaacatggattcagtagtgcggccaaattccataaagggatgacaatgtcacatcgacgtatgactaaatatcgaaaagatgtaaagcctatattatcaaaacctttggtggcacttgatttagaaacaactggattggatagtactaaagcagaaattatttcaattggagcagccaagataatgcccgacggacaattactgcaatttgaaaaattaattcgaagtgtggattcagtaccatccaaaattactgaacttaccggaattacttcagaacagttgcaaaaacagggtgttgagctttcattaggattagaggcattgtctgattttgttaaggattcagtcatcatcggttataatcttgaatttgatgaaaggtttttaacggaagcattgcggaaagttggaaaaaccgaatttactaactctacccacgatcttatgccaatagtaaaaacaactcaggagtttttagataactatcgtttaacgactgtcttggaagtatatcagatagagaatttagatccacatcatgcattatctgatgctcaagctacgttgtctttagcagagaagttaataaaaaacggcaaccttgtaatttgaaaatgcctatgtaaaggctttttttagtgtgctccccatatacatggggatgattccagcacgttcatggcacgcccaccttgcacaccgtgctccccatatacatggggatgattctggatcccgcacgattcttgagaaactgtctccgtgctccccatatacatggggatgattcccgaggcgctatcatcaattcaaaattcacttggtgctccccatatacatggggatgattcctgaaatagcgtcccgaacggccttaataatatgtgctccccatatacatggggatgattctaatagcaatacgaacattttcttcctcctagcgtgctccccatatacatggggatgattctaataaaactaagacggctgttatgaaagaaatgtgctccccatatacatggggatgattctacaaaaatatattatttcgggaatataagaaagtgctccccatatacatggggatgattctaatgctgaaaatgccggactaatcaatgctgagtgctccccatatacatggggatgattccaagtccagcgacgactgcagcaattgcagcaagtgctccccatatacatggggatgattctaacggatgggatggtattatcgctgttgctcagtgctccccatatacatggggatgattcccgctttggctgaatctaaaagtgcttgttcgtgtgctccccatatacatggggatgattcttaacaggcgacttcgcacagcttcaacaattagtgctccccatatacatggggatgattctagtatgagtgatagaaaaattgtactaacccagtgctccccatatacatggggatgattctggtacagacggtggaacttggatgaactacattgttggtaccactgataccacaaagagacattatgtggcaaccatcttgctggatgggttttcgcagcaaggtgtttatatccgccttgataatattccttcgacatccactattacattttcaaatatgaaactgcaattaggtttaaatgtggtggtctccaatctttctcaagccgtggatggtatgcgacttgatatctctaagaaaattgagcagaaggatctcaacggatatgcaacccaaacgtggacactggatcagattaagttaatttctgattcaattgcttcgttgaaaacaaaaattgacaatcttagtcaatgaaaacaataagaagtaacatccacagctataactgatgggtcaaaccatcacagcaacagacgatacaggtaagacagtaaaactaaagattacaggaatcagctaaaaagctagttccttttttttagtacaaaaatttaggagatgaaatatatatgtatggaacaccagttttactaccacacgcaggctttaccgattggcagtttgctatcgaacatatgggaagcaacactttactaaatacactatttattttaattattgctgatgtgattacaggaatagcaaaatcaatcatcactcatagtgtggatagttcgatcggcaaaaaaggattagcaagacacttcacgattattctgttggtcgcattgctttatccatggtcactagcgattaactaccaatggctaggtgactcagttttaagtttgtggacattcatgtatgcaacttcgattgtagaaaatatcggacaaatgggattgccgctaccgaagtttattaaagacaggctaaataaatttggccaagacatggaagattaagaaccaaaacaagaaaacgataacgtaaaggagataaataaatgaattttaatatcgataattcttacgaattaggagctaatgaaggctcatctcaagcaacaaacaataaatacattgtcctacacgaaacaacaaatatcggtgccaaagctaatgcaagctaggctcctatgtcaagaatccggacataaaagtacgaacaaatttgactttcaatttaaattacttaattcacatttggtttgtcgaaactttgttcagttttcaaaggtctacatcagatattagttaatcactcattaaattaaaactcataagcaacacaatctatcttatcatgtataaacccgaatgtcaacaactttttttaagtaatattcattcaacgttttgctacatgctcatctctcgacgacatagaatatcttaccatcctagtgggacaacgtcaatcactaatttgaaaaaaattcaaaaaattgaattcctgtataaatatcgaaaaaataattcatatcacccggattctcatccctaatctgcgctattgattatccctcataatacttttaaactgctatttgttccaattttatccaaattggtataggtaaacaaaaagatcctgcaaaattcgcagaatcttcacgtcctaatagaagtcttctaggttttcatagtctaatatcgcaatctttcgaccgtttcgttcaattagcgcatgactttctaactgttttaacttacgcgataaggtttcaggcgttgttccaatatatgttgccagttcttttaacttcatcggaatcatcacttcagtttctccgctcgctttagctaaatcaagtagataagtcacgattctggattcaactgactcgatattgattaagttcgcctgtttttccaaacgcgtcatcttatcagtagttgcttctagtaactttaaactaatttcgggataggctaacagtaactgttgaaaagcactccgcgataacgtacagattgtactatcttgcaagacctcaccgtacaacggctcatcttccgttttaaaaagtaacttttctccttcaaaatcaccgggttccatcatgcgtagcagttgctctttgcctgctgtagagagctgatagaccttaatgctccccttagctaagatcactaaccgcttctgatccatcgggttcatcaccaacgtcccttttttaacgcgttcatgatgggtaactgccgaaatcttgaccaaactatcacggtctaaatgattaaaaatcggtactatctcagcacaaatatgttgttcgtcagtcacctagcccacttccctctatcttaatcgtcgtcttcttcatctaatccttcgcgcgctgcttttcctagttggctttgcaattcacggatttggtgttggttgtagcccattaaagaaaccatatccgccgctaaagcaaatcgttcttctttttccgcaagtttaatcgcacgggaaacaaatagattagcagtattatagtccgcaaccatttccgcaatcatcgctggcatctcccagtacttaatccgcggctcttctgtcagcatcccatactcggtatactcagcttgcgtcgtcggaagcacttcaccttcgtctagtagccgttcggccgtcttgtctaatagcatatcattttctgcaagcaatgtggttaattgcgctttaaaagcttggttattgattcctttagcgtaccacttcatttgacggagtttacgccgttgaatcgttaagttagccatcacatggccgatcatggcacccgcggttggtgtatggtgatcaacatcagcttgtttaacttctgcttggtaacgtgtttcgatttcttcattagataacatattaattgccccctatttcactttgatactttgaacgctgtagcctaagtcagttacagcttgtgttaattcatctgggtttgtcacggcttcatcatattctgctttcactttactagcattaaagagaactttcactgattcaaccccatcttgttgactgacacccgcttgaatcttttgcatacatgacggacatgatagctcgtctaattgcatcaccaattttgccatttcaatgaccaccttttcgtttgattactgttactatatcgcgcgctgcatgattaaaaattgaccgccatcaagtttagcgaactttaaaccgaatcaggcgcatcgcattgaaaatcacgaccagaatactaatctcatgaacaaacatcccactagccatctgtacccagccaagcatcaggccaagcaataacaatccgaccgttccaacagcaatcacaatattttgaactgtattacgtgccgtcgccttcgtgaggtaatcggcatacactaattcggataacgtcgattgcattaacacaatatccgaagtttcaatcgcgacatctgtcccagaacccatcgcaattccaatgtcagccagtgcaagcgaaggactatcattaatcccatccccgataaaagccactttttgaccgtttgcttggtaggtcttaatgaattcaaccttctctgccggcaaaagattcgcgtggtattcagtaatcccgacggctttggcaattgctgcggccgtctggtcattatcgcccgtcaacatgactaaatgtttaacgcccgcttttttcaaacgcgttaatgctgccttggcttccggtttaacagtatcagcaatcccaattaataaaacaacttgttggtcaactgcgactaatacggttgattgccctgctgtttgactggccgtgatcgccgcaatctgcgcaccggttaaccggatccctgcttcagtcatcatcttggcccgcccaatccgaattgtttgaccagcgacttcagcttgtacccccaaccctttgagcgtttcaattcgttcaatagttggtaagtctgtcaccccttgttcccgtgcatactgcacaatcgcagtcgccagtggatgatctgactgtgcttcaaccgcggtagtcactgccaacgttgcttgttctgccgctgtataaaattgcacatgtgcaactgccgtgtcccctttagtcaatgttccagttttatcaaagaccatcgtatcaatgccagccatcgcattaacgacttcgccgcctttaatcaaaaccccatgcttcgcgccattgccaatccccgccacgattgaaactggcgcaccaattactagcgcacctggacaaccaagcaccagaatcgtaatcgcgagtttaaagtcgcgcgtgattaagccaatcgctaatgccaacactaaaacggccggtgtgtaataggtcgcaaaacgatcaatgaatttttccgcgggtgacttactatcttgggcctcttcaaccaattcaataatttgggcaaaagttgtatcatccccaacctgcgttgcggtaaccgtcaatgtcccgttatccacaattgccccggaataaacagcatcacccactattttcttaacgagttgtgcttcgccagtgatgctagcttcattgacataggcactaccttggacgacttgcccatcaaccggcacctgagcgccagctttaaccaatacttgatcatcgatttcgacatcatcaacatctaccgtcgtagtagtgccatcggccgctaacacttgtgccgtttgtggcgccatttcagacaatgcgcgaattgattctcgtgtctttttcaaggttcgttgttcaagatagctcccgaataaaaagaggaacgtgacaatcgccgattcattgaactcaccaatgattagcgctcccaataccgcaatcgtgaccagcaaatcaatgctgatgactttcacttttagcgcttgatacgcctgcatcaaaatcggtgcaacccccatcattgacgcaaccaataacagcccttgcatcacaattaccgccccaccaagccaataccagccataggccactgcaatcaatccgccaacagtcagcgcaatctgattcttcacggattgtaaccatctttgaaatttcatttaaaatcccttcttcctaacgattgtctttagtatagaagaaagccgattttaagaacttgatggttatcaagtttacccgaatataacagacaaaaaagcacaatcaacgattgtttcgtcgattgtgctttttcaattcgattaggcttcaaacccattttgatcagcgacttgcttgaaccaatgacctgattttttaatcgtccgttggcaatcatggtctaagtccaccgcaataaaaccgtagcggttcttataggcgttggtccatgaccagttatccatacacgtccacatatgataaccgagacagctactcccttcttggagggcttgatggacatacttcaaatgatcctgtacaaattcaatccggtagtcatcatcaatctggccatcggcattgcgataacgttcttcgccttcaacgcccatcccgttttccgaaatgaagcaagcaatgttgccgtaattttcgcggacgttctttaaaatatcgtaaatcccacgttcgtagatttcccacccgcgatacggattgactttcttacccggcatatcgtaattgtcgaaaaaatcatccggcatcgggccgtttgtatggtcgattggggtttccttggccttcacgcgccgtggttgataataattaatccccaataaatccacagtattcgccttaatcactgccaagtcagctggttgatagtcgggtaagatggctagatcttttaaaatcgcgaccaaatcagcggggaattcccccttcacggcaggatctaagaatgaacggttgaaaaaagcatctgcaacttgtgcggctttcacatctgccggattagtcgcatcccgaggataacttggggttaagttaaggataatgccaatttgtcccccttgattgcgtgcgtgatatttttgaatcgccatcgcactcgctaatgtttcgtgataaccaacttgtaccgcatgcgctaaattaatttcagctggataatggaactgatataaatagccgccttcaaccggcacaatcggttcattgtgtgtgaaccatttcttcacccgatccccaaataattcaaaacaggtttcagcataatgaacgtaagcatcaatcgtctcacgattgagccaaccaccttttttctggagtgctagcggcatatcaaaatggtataaattcataaacggttcgatgccgtttgcgattaattcgtcgatgtacgcattataaaaatcgacagcttgtagattaatctcccccgtaccttgtggaaacaaccgactccattgaatcgatgtccgaaaactattgtgtcctgtttgtttcatcaattggatatcacttttgaattgttgatacacatcagaggtccgcgctgggcccacttggttaaaaaacttttctggcgcttgttgataccaataatcccaaatattatcgcccttaccatcaccgtcaatccggccttctgtttggggaccacttgctgctgaaccccaccaaaaatcctttggaaagtcataaaaagtcatcgctagcactccttcttgtttgaatagcctcagtatatcagcttctttttaaaaaaccaactcttttatttaaatgtatagacttttcaaaaagagcgtgctatattgagaatgtaatcgattgcaaacacatgtaaaggacggtgctctacgtgaatacttttatggacacgcttagcaagaaaatcatgcctttcgcaaataagttaggccaaaatcgttacctaactgttctacgagacgcatttatgctttcattcccattgacgatgtttggatcaatcatcgtcgttatcactaacctgccatttttcaacgatgccaccaaagcgaccctaacggaactccttggtaatggacaaaatgccacaatgtcaatcatgacggtcttcgtcacattcgggattggttattatctttctaattcatatgatgtggacggaattttcggcggtgctgtttcattcgccagtttcctaatcctcaccccattcatgatgaccaccgataaaggcgttgacgttagcggtgttttaagtctcgatcgacttggcgctaaagggatgttcattgggatgattgcggcatttatcgctgcagaaatttattgccggattactaaaaaaggctggcaaattaagatgccagacggtgtcccacctgcagttgcgaaatcattcgccgctttaattccagctattttaaccttaaccattttcttagtcattcaagcggcagtcactggtttattccacgtaaacttgcacgacgtgatctatgaaattattcaaaaaccactcgttggtttaggtggcagtcttcctgcaaccctaatcgcattgttctttgtccaattgctctggttcttcggtcttcacgggcaaattatcgtcaactctgtaatggatccgatctggaacacattaatgctcgaaaacttggaagcttacaaagctggccatgctttaccacatattgtcacgaaaccattcatggaaactttcaccgtaggtctcggtggttctgggatgacattagccgtcgtcttactgatggcctttatcatgaagaaaaaacaataccgcgatgtcggacgtttggccttggcacccgctgtcttcaacgttaacgaacctgtcattttcgggttcccaatcgttttaaacgccacaattttcattccatggctgattgcaccactgattgtcacagcgctcaactacactgtaatggcaatcggattggtgcctacgccaactggggtttcagtcccatggaccgtcccaatcttcttcagtgggatgctcgcaaccaactcagtactcggcgggatcttacaactcattgacgttgtgctagtcggtctcatctggttcccattcattaaaatgctagatcgccaaaaagaccctctcgcaaactaaagattgttttaccccgttgtttccactaaactataagtagaaagcggggtattttttttgccaaaatacgaagaaattgccaacattattcgacaacggattaaacaagggcgctatcctgctaatacgttgttacccaatcaaaccgacttagttcaagaattcgatgccagtcgaatgacgatcaaaaaagcaatcacgattttaacgatggaaggactcgttctatcacgacgcggcgctggtacaaaggtgttagaccactctttttggaataaatcaacggcaccggcggatcaataccgtgggatgtcacgtgacttagccgacattggtaaaacactctcaagtaagatcatcacgtttgaggtgactttcccaacacctgagattaaagagcgcttaatgcttgctgatcaacagcccgtctacaaaatcattcgactgcggattatcgacggcgttaatagcgtcctcgaacatacctacatgccagtgagcctagttcccggattaactgatgatgttctcgcacagtcaatctacacctaccttaaggagaacctacacctcacgttcgcgggcgcctttcgtaatattcaagccgataaggccgatgaatatgaccagcaatatctggactgcgccccaactgatcccgtcttagaagttgagcaagttgtttatctcgataatggccaaccgattgaatactcaagaagccgcaaccgttatgatcgccgcggttatacattcttagacgttaagaatacttaattgcactaaaaaaagcctgccagcatttagctgacaggctttttctattgattatttttcgacatcttgtaatttttggttgtcgtctaattgtgagcgaccaccgttgccgattttttgtaaatgattcattcctaaccataatagcaagagtgctacgatgatgaaggctaagagaacaaagaatgattgaacaatttgaccggtacctaaaccagatgtaattgcttctctgagccctagaattgaatacgtcattggtaagaatgggtgaatgacgttgtagaagtggttcgtgatttccattgggaatgtaccacctgaaccccctaattgaagcatcaagaggaccattgctaagaaacgaccaggattatcaaatgtcattgataagaacataatgatcgacatcgaagcaagtgagaaggtaattgccattaggaagaattgtgctggatgatcgacgtttaatccagcaaccatcattaaggcaggttcgataattgccatcccgacagcgactaaagcgccaaccgtgattttacttaagaaccatgctgttgatgattgaccagtcattgagatcttccgaattggataagcaaagttgaagacaattgcgccaacgaacaatgctactgaaaggacgtaaggtgctaaggcatgaccgtagttaggcacatagctgtaatttgaatgtttcaattcagcaggtgcagcaaacatatcggctgtcttatccgttaattgaattgagttaacttcatttgcaccagatttcaatgcagatgctaatgtcttattaccatctgttaattgaccagcaccatctgttaacttagctgagttatccgttaattgatttgtaccagcagctaattgatcaacaccgcttgttaacgttggaatttgaccatttaattgaccaagaccattgttcaaggctgttgaaccagttgctaattgactgataccacttgtcaattgaggtacttgggcatttaaagcaccagtaccggcagcaagttgttgtccaccagctactaatttagagctttgagctgttaattgaccaacaccgcttgttgctgatttaacaccgtcagtataaccattaattcctgttactaaggtattaatctgtggtgtcatcgttgattgactagcaatccccattactttattactaatttctgcttttgaagttaattcagctgcattaattgctggcgtattattaggaccatttacaccttggtttaattgcgttgcaattcctgttgcttgagttgatgcagcattcaattgagcgataccagctgttaattgttgcatttgaaccattaagccagaaatttgatctcgcatttgttgattcgttaatgcgtcactcattgttaataattgttgtgacttcgtacttaattctgttagttgagcaacagcgttatctaattgacccatttgaccaagtaatggcgttaattggttaatcatccctgttatttgtccaacatttaattgttcacttgctgcagcaattgtttgcactgaagttaagtttgaacctgccttagcctgaatatcttgtaatgctttttgacttgcaggacttaagttagctgaatctgcactaattgtttgtacgtcagctaatgttgtctgcgagttaccagcaattgtattagctgaggtattcaatgttgtttcaaacgctgataattgagaacttaaagctggcaattgagctaacgctgctttattttctttataggcattatctaattgaactaataccgccatacttggttgcaattcgtttaacattgttgctaactgtttagattgtgcgttaacactcttcatcgttgcaggcatttgggcaaatttttgcattaaatccgtttgattgcttaattgagtattaatttgaccaattccttggttcatcactgaatttaaaacatataagcctgcgacaccggcgggaagttggcttgttgaagatgccaaacttgtggcacccgagctaagttgatttgagaagccattaagcgtgtttaaaccagtgcccaacgcgccaactccgtttgtataagctgtaacaccactactaatttggcttgcaccatcattcaattggcttgcgcctgatgcgagtgcacccgtcttgctatctaataatagtaagccgttgttaagtgtgtttgagccatcagctaattgtttaacaccatctgataatggcacaacgcttgttttcatcgtcatgataccatcgttgacttgagcaacaccggctgtataaacatttaaaccatctgataacgttacagaaccgtctgttaattgtttagcacccttggcagcagtactgaaccctttaccggcagtcttaacctgtttgaacatcactttagcgtaagcatttgtgacagtttcccgaacttgggcgttcaattccttggcacccatttcactgataacttcaccgatgaagttcaatgaatcgttggttttgtattgaatttgcatcttcttaggattcttatccaagactgtagcagcattggcagagaagttcttaggtagggtcactacagtgtagtattccttatctttaagcccttgttgtgctttttttgctgatacgaaacgccaaccaagttggtcgtttttcttcaattcttttaccatatctttaccagcgctcaacgtttcaccgttgtaagtggctggttgatcattattaacgacagcgactggtaattcaccagtgctaccataaggatcccagacagatttaaggaaaaagatactgtacaagaatggaataaacacgattgcgattaacgaaatcatgattaaacgattcttggcaatgaacttaaattcgttttggatcatcttcatgctaaaatctcctttaattatataagttgcttaattgattacattcaatatccacgataactaaattagtctaaccttttttcatttaaatttcaagtcttatgcgccaaactattctctattcacaactgtttctaatctaacaaaaaaagacggtcgttatttatataacaaccgtctcccttatggaagaaacaaatgacttcctattaaattaattattttgtttcaatcttcgtcatgccgcccatgtatggtaccaattgttctgggattgtgacgctgccgtcttcgttttgatagttttccaagatggcggcaactgtccggccgactgctaagcctgaaccgttcaatgtgtggaccaagttgacgtggccatcttcgtcacggtaacgaatttgggcgcggcgtgcttggaagtctgtacaatctgaacaacttgagatttcacggtacgtattttgagctggtaaccaaacttcgatatcgtatgtcttagctgatgtgaagctggcatcgccagttgccaatgtgatgacgtgatatggcaagttcaatgcttttaagatattttcagcatcggcggtcattttttctagttcattgaatgattcttctggtttcgtgaatttcaccatttcaactttgttaaattgatgcatccggattaaaccacgggtatcacggccggcacttcctgcttctgaacggaaagctggtgataaggcagtgaagtagattggcaattgtgcgccatccaagatttcgtcgcggtagaagttcgtcaatggcacttcggcggttggaatcaaagtcatgggttcgccttcgttggtcattgtgtaaacatcttccgtaaacttaggaaattggccagtcccaaacattgattcgccattcactaagtacggcgtaatcatttcttcatagccttctttagcatgttgatccaacatgaagttataaatggcccgttcaagacgtgcaccggcacccttatagtaaacaaagcgactacctgatactttagcggcgcgttcaaagtctaagatgcctaatttttcaccgatatcccagtgtgctaatggttcaaaatcaaattcacggggtgttgaccatttgcgttcttcacggctaaaactttcatctgggccaacgggtgctgaatcatctgggaagttgggtaagcggactaagatgtagtccactttggccttcacttcagccaattcgctatccaaagccttgatttcggccccaacattcttcatggcagcgatttgttcagtcgcatcttctttattgcgcttggcaacggcgatggcttctgaggcagcattgcgatttttcttcaattcttcggtcttcacaattaaggcacggcgtttttcatctaatgcgatgacctcatcaatttctgcagcttgaacaccgcggctagctaacttatcctttgcccattggacattttctcgaatgactttaatatctaacattgcactctctccttttaatgatctttaattaacaacaataaaaaaagccttctcatcccttaattgggacgaaaagacttcaattcgcggtaccacccaagttcacccactacaaataataggtgccctcaattactgataacggccaggaaccgtgtagttcatcactacccactattgcgctggaatgctggattcaataccttccaccaaccggtatctctctgtcaatccatataggcgcttattcacgtgtttacttcttaatgtaagaataccgcatttaatctttaaattcaatcatcaatagatgatttttgaatccatagaccccgtaataaaccgagcatacgtccaaaatgatcgctatctgcattttgatgccatttaaacatcaccgcttctgggttaacgatgccagttaaatcaatgctcgaagtcgtaaccaccatatcagcatccattaaatccgcgtcagattgactaacatccacatacaaaacactattcagtgcagtcatcaaatcaaagtacccgaggaaggattgttccgtcacaacgacaaccttcactttattcatcggtgcaaaccgttgaatcatctgacgcaagacgttgtagtaaccactgaccaattcttcacgtaatttgactaagaatgacactttcggattgattaataagtaatccaccgtatcatcaatattttattttaggacatcatttggcttgagatattcaacactttccatcatttggtcagcgagcaccgatgtcacatcttgtttaaacatgtaagtggtcatcgtcatcgaaatcatcgtttgcacgaaaccttgataattcgcatcgtctaagtttaggtatttcttgatatcaaatggaatttgatcaataaaagcttctacaaattcgtaaatcactggaatataccgcttgtatcgcgtttcgtaagattccatgtagggattagcatcctgaatctgaatcggtccaaaattaatgatgtcatatatattgaatgattcagccatcgcttcttcttgggtcatttgtgcaagaatgctcttgatccgtaaagcttggtcttcaaagggctattttagatattcagaaaccatattgggaactggataacggataaaatcgccatctagttcagttgaaaccgtgtgaccttgtagtaatcggaaataggttacgacgattgaatacgcccctagttcacgggtcaaaatattggttttttccaattggaaccgatcaatcgcaacatcgaacgccttaagtgcatcgtctcgtttaacatcttcaaagggccaggtatgcccttccgttgccatccagaataacatcgttaagactaaatgaattttactttcgtcgccttctaaccgaagtgaatcataatacatacggatatcaaatgagcgaattaagtcgcgcaccccttttaaatggcgtagcgccgttgccttactcgtatcatgggcttcccagaattcttggaatgtaacggtctcacccttgagtaagattttgataaaatcaaacgcttctgacttattcactaataaatagtgataggcatctgttggaacgctgaacaaggttttaatatcatcaacatccggtccgataatttcctttaggtccccaataatgctcatgtacatattgtacaagctaccgtaactgcgatttaatagcattgctacttgttttagattcacatcttcaacgagcggctgattattacgcgatagttcaatccgctttttaacaggcaactcatcccgttttaaaccaacaatctccattaataaggcgtacttatcattttccgcttgcgttagaaaaatactctcacttgcgttcaaaccgattccccctagtaaaaatccttataaaaataaaaaaacttcgcctacacttaaaatttcaaatcccttgtatctcattagggttctacaattttaaacataaacaaagtttttcaacttttatcatttaatattcaacgaattaataaattgataatccacatatcggccttctccactattactattggaataacgactgattaaataaatattcttctgcttcagtttagcatcgagagaaactttaatatcgaagccactctgcgccgcattatcaacagttggatagacagctgcgacatcatttcgagtaatcctattaatgcgaacccgtccaatttctttattatttgctttattcattatgatgataaaattattatttaagccttgaacgttcttagaaatatgccatcccgaaatatggaggatattaccattttggataagttgatcaatacttcctaaattacttgggccttgtggtacgttaacaacattaggaaattgatagtcaacataatcactgttaccattcgtggtacttgtatagcgactaataacgtagaaattcttgccttctaaactcttatccaccgctaattcagcactaaaaccactcataccagaattatacacattaggatatacactatgaacatcatttctcaatgaattattaactttcaagcgcttaatttctttattagtatcgacattcattacaatcagataatgcgtattttttccttgtgcataatcactcgcatgccaaccattcattgaaattttatttgaattaactttaacgttatccaaactacctaaattttgcttagttggcgcaggaacttttacagtattaccgaaatcaaagtcttttgcactcccttcaccgcttggtaattgtgcataacgcgatataaccctataggtatgtccgtacattcctgagtctactgggatgttggcattaataccactcattgctgccgtgttaatagacggataggcatttgctacatcatctctcctaccacgattaattgcaatccttttatgttcttttcctgtattggtatcaattagaattaaataactgtacggtaaattattggcatcattaattgcatgccaaccaagcgcaaggatattattgctatttgcagttaattgatcaaggctaccgacattatccgttacttctcgatcccaacttgttaatccatactgctcaatcaaactgtttaacaaagtatcatagttaggcgctgtagcataaccgtcttgtttcaaaagactcgttacctcacgataattagttttccacaacaaattatgatatcgtgaatttactgccaaaaagttcccatgatcttcgatactttcattccaactattgtattttctaaattgcgcattaactgtaatccactgaccattaatatattcttgagtgggcattgttacgtactgaccattgtatgttcccttaattccaaataagttattaccatacgttgctaaagtcgattgcccccaaccgctctccaagattgcctgcgcacctgaaacagagggtaatacaccatacttgcgccatgacgaaattgcaccatcatgaatactactaataaaactggaggtatttcgtaataaattcattgaagctctggaggtatttcgtaataaattcattgaagctggcgtacttctttgacttactttaggcgcatcataaaacccaggaccaatttcattattttgctttacagtaacttcttccttgttctttgtttctgctgctgattcactatttttaattacaccggattcagttgaattatcggtagatggcttttgttctttagaactttgactacttgctgatataatactttcattactgctcattaatgcaggggctgtctcttgtttttgttcagccgctgatactcgttgatttgttgttaagccaattaaaccaatcgtactcattaaaatactattcttaacaatttttttcacttcacaagtcgctcctagttagttttttcagacatactaataatacaatacaattacttaaaacactatttcgttttagttacaaataaaaaccgaacatcttatccacacggttaagacgttcggcaatattttttagatgttcaaggcattgtcaaacacgtaatcaaccgtatttccctcacctgaaggattatctgaataacggctaatcacatatattcttttgttaaccaaactgttatcgatattaaacgttaaaccaaatccactgtttttagagccgtataatgttggatagacagcagctacatcatttcttaaagaacgattaattttataacgccgaatttctttgtttgttgtcttatccataataattaaataactatacggtttattaatcgaagcattagcagcatgccatcccgacattattacggtattatttacacgagacaattgatccatacttgcagcactttcaataacttgtttcttaggaactccaatttgattaatgaattgataatccacataatcagcatcagcatttgccgttgctgaataacgactaatgaagtaaatattcttgccttgtaattgactgtcaactgggatatctgcagaaaatccgctcagccccgccttatatagatcgggataagcagcagctacatcatttcttggtgagttggcgatagtcatccgtttaatttctttatgtgtattagcatccattacaattaaagtgtgaacattacggccttgtgcattatcatttgcttgccaaccgctgatgtgaacattattgaaacttgccgttagggtgtcaatactccctaaattttgtttaacaattgctggtactgttacctgattatcaaacgaatagtctacgtatgctccttcgccatttggtgtacttgagtaacgtgaaattactttatacgtattaccgcgcatatcatttgttactggaatactcaaaccaaacccacttttttctgcattggcaatattcggataaacttgtcgaacatcgtcacgttgcgtacggttaattgcatagcgcttatattcacggcctgtcttagcattaattacaattaaataactgtatggataccgactagaatccactgatgcgtgccaaccagacattgataatgtcttcttatcagcagttaatgaatccatacttgctacactggtttcttgcttaggtactttaataatatttctaaatgtgaaatcaacagtgtcggtattaccgttgggatctgacgagtagcgagacataagaacgtaactcctattatgcatattattatctaatgtcaatgtattgttaaatcctgaatgtaatgaattggtaatgttttcataaatgttatgcacatcttgacgatttacacgatttattttataccgttttacttctttatgtgtcttactatctaataagaataggtagctatatggccgattggctgtttgctgtgctgtatgccaacccaccacatgaatttcattttcagacacattaacactgttaaggctcgctttatttgcaggcatttgatcataataatgttgcactaatgcataaaattgattcatgtcatacccatattttgcaaagtaagcatctggatcagtatggtctgttccaccaagatattgtgtaacattatgatgtgaccagattgtaccaaccccattatgattctgtgccaaagatggcgttaaattatatttgtttaacaagtaagcagtgtaccacgctgagtaactcgttgtcttagcaaaatcttcgaagttacgagccgttaccatttcaaattgggcaaaatatttattaccaactgccccactaccccatgcaccataatctgtatcatgaatgtttaatattgtcctagcatcaataaaggtatgaacaaatgctgattgccacccaccattaatctcatagtctgcttcactccgagcactataattattagggttatcagtataatgaacaaccactccgttaggacgattatcatctgttttataattaaatattgagaatgtatgcaaatcttgcgtaatgtttggatgtaagtagttgtgttgatatatataattattgacacttggataacctgctttaggcataatcgcctttttaaccttagatgaatcaataggcatcccaatatcgtcagtcttcgcttttttctcttttataggtgttgcttcttttgtatcttgactatttagttgcgttttcatttcatctggcgttagcacttgtccagcttgaacattgtttgtagcaaacaaaaaggtcgccgagaccattgtaaatccaattaagaacttcgttagttttctattcattttttcccctctagaatccttaattaacttccacgtagaatattaacataaactttaatatttttacagtctgttcagcattattaatcatataaacatttattggctattaatcaaaaaaaacgtcctgaaccttatcggttcaggacgttttaattatctttccaaataaaactcaaatcgttcgcccacatattgggtgcggacatattcgaaaggttcgccgtttgataagaaggaaacttgtcgtaatttcaagattgggccattacgcttaatgtcgagatattcggcaattcgttctgaggcgagttgggctgagacggtttgttgtgcaccgcccatttcgtagccccctttttcggctaatgctttatagaaggaagacgtgatttcagctttactgaaatcggcaactaagctttgtggcacggttgccacttcaaaacagatgggcacattgtcggcatagcgaatccgttccatgcggagcacctgctcgccatcttttaactggagcttttcagcttcgctaagtgatgggttggcaatgtggaacgaaatggttttactagatggctgcttaccttgggcagtcattagatcggtaaaactagtgacgccggacattttttcttgcaccttttggttagcgacatatgtcccagccccaatacggcgttccaaaattccttcgtcgaccaatgtttgaacagcttgccgtaatgtcattcgtgagacttcgaaatttaaagcaagctcccgttctgaaggaattcgatctccaatcgaccacttgccggcttcaatatcctttttaagttgattatgaatttgaatataaacaggtgattccatgggacacactcctaaatattaatgttgatagccgttcccaaagctgtaagttgcgactaagttttgctgatggtctaagatgttgaaatcagcatcccgaccttcttctaatttacctttttgtgttaagccaaattcttcggcttggttgacacttgacatcataacggcttcaaacgtttcacaacctgtgaatgtttggatgttcttgaaggcatcgatatatgttaacactgatccggctaaagtgccatcttctaagcgtgcttgtttgtctttaacaatgactttttgaccgcctaattcgctttcgccttcagcaatccctttagcccgcattgaatcagtcacaaggtcgatgcgttctgcacctttttgttcgtaagctaatttaatcatgtcaggcacgatatggaaaccatcagcgattaattcagcgtacatgttgtcttctaacattgcgtgacctgtaacgccaggttcgcggtgcttgaattcacgttgggcattgtataaatgggtaacgtgcgttgctttactttcaagcatttgttcacgcgttgcattactatgaccaactgaaggcacgatgttgtgtgctaagcagtagtcttcgaatgcttttgaaccaggatcttctggtgcataagtaattaaacggacacggttacctgataacttattccattcgtccaataaatcaacgtctggatctttgatgaattgttctggttgagcacccttgaagattggtgcgatgaatgggccttccaaatgaacaccttgaattaatgggttcttttcagccgctgctttaacaccgcgcatagcattagcaatgttttcgtttgattgcgtcatcgttgttgcaaataaggttgtgaccccttcattttgcatcatcttagttgccatttcgtcgatttggtcagcatcgccgtccattgcatcaaaaccataaccaccgtgacagtgaacgtcaataaagccaggaatgattgtcttgcctttaacgtcttgaatttcttcgccagcttgtgccttgtagtcgaacattgggcccactgccaaaattttatcatcgaaacgaatataaccgtcttcgataacgtcgtcacctgtatagattaccgcatgttttaatacttttactgccattatccatccacctctatctttaaattacctctagtataaatggtatagaccaaaaaaacaagggattccgactaaactttgaaccgttttcttgttaatttgctatactatatttatccattcatattaaggagtttaacgatgttaaaaatcggtgttattggactaggaaacattgcacaaaaagcatatttacctgtaatggcgcagatgcaagaccgggttgattgggtcttatgtacgcgccaaccggctaaattagcgcagcttcaagcgcaatatcatttagaaagtggctgcctatcatttgacacattactcgaacaaccactcgacgcagttttcattcacaccccaactgcaacccactatcaatatgttaaacaagccctgctccatggtttacacgtttttgtcgataaacccttaagtgaaaatccactggaagtcgccgaattatacaaactcgcggctagcaaagaacggctcttaacggtcggcttcaaccgccgttttgccccatttttgcaaaaattaaatcacttacccgataaacaactgatcaacatcactaaaacacgcgtggcaacgagccaaccaacgccctttgccatttatgacctgatgattcataccattgatacggcgcttttcttggctgattcactaggtaccaattacaaaatccgtccatactgtcagcaggatgcaaacggcaatttacaactcgcgcaattaaccattgaaacaccgcgccaattaatcagcgcgactttaaatatgcaaagtggtaccaatcaagaaattgcaagtctccagacaccacacgggttattcactgtcgataatctaacgcgctacacaacacaagcggcagaagacagtcgtattcaaactgcagctgactggacgcctacgcttgaaacgcggggctttgcgccaatgattgatgcgtttattactgcccttgaaactaacggcgcaaatcctatcccactagaaagtagcttactcacccaccaactctgtcatgagatggtccactttacaaaataatataaaaaagcgtaacccaatacagtatttgtatcaggttacgctttttacatgcttgagagcactctatttttggctttctaaatccttcgcaattgttgcgtcgatgcctttaaccaccgctgtcattaagccggcttcttccattgctaacaagccagcaacggttgtaccacctggtgatgaaacttgatccactaagtcccaaggtgaatcatcactcataagcacgttttgggcactccctaaaacggcttgagctgcaatttcggttgcggctttctttgttaaaccgtgtttaacgccggcccgcgccattgaatcaatgaataggtaaacaaatgctggtgaactaccggcaagcgcactgaaagttgtgaaatctttttcgccgatttcaaccacgccccccagttgtgcaaggacatccttcacccgacccaattgctctgcattgacttgttcgttaccaacaacagctgttatccctgcgcgattggccacgttaacatttggcatgatgcgtagaattggtaaatctgcagcagattgttctgctaatttatcaagtgataaacctgctgccattgaaaccatcaatggttgatgtgctttaaaggctgcatttgtttctgctaaaacctgtggcacaatatatggttttaccgctaaaaaaacgatgtcggcttgttcaaccactgaattgttatccgcaacagctgtaatccgttgttcagctacaaaatccgcatagttcgccggatgtccgccatgcactaaaatatccgttgttgcgacttgattagctttcactaagcctttaatcattgcttgtgccatgttaccgacaccaataaatccaattttcattctgccacccctttttttatttatccaaggataccgaacgagcggaggaaagtcaatccaggacacaaaaaaagacatcttagcaagatgtctttaaagtattgggctagctggattcgaaccagcgcatgacaggatcaaaacctgttgccttaccgcttggccatagcccaatcaagtggaggagagtggattcgaaccaccgaacccgaaggagcggatttacagtccgccgcgtttagccacttcgctactcctccatacgtttcatctcatcgattcaactatattagtttacaaaattctgacagaaaaatcaaccccaaaatgcaaaaaaaatcttgattattgcataaataatcaagattttttctaatatttagttaacgccttccattaacttatgaattggtttaacgaagaagattaagacgatcccgaagatggcactcacaatcccaatccctaagaaatatctaatttctgtttgtggtgaatataaacgcacaagctgtgcattaattgcttggcccgcagcatctgctaagaaccacatactcatcatttgtgattggaatgcctttggcgctaattttgttgtaattgacaacccaattggtgaaattaacatttcagcaatttcaacgatgaaccatgaaccgattaaccagaatgggctaactcggccagcggtaccgtgtaataatccaggaagtgccataaacatgtatgataaaccagcgaagattaaaccaacagcaaacttaccaggtgcagatggttgtttcttccaagcactccataaccatacaaagaatggcgttagaagcataataaatagtggattcaatgattggaaatttgatgcagctaagctatgcccaccaatgtttagaattgtccgatcttctgcaaataaggctagaacaacggagccagattcttcaattccccagaagatagcagctgcaataaagagtggaatataagctataacgcgtgaacgttccttcttagtcactttcttgctgcccaacatccgtgagaagtacacaattggtaatgcaatcgcaatgattgaaatcatcaagacgatgttatcaatgtttaagttgcctgtaaattgcatgcctaatactacggcaacgacgaccacgacaccaatcacaattttacgaataacgcttgataattcttctggcgcaattggatcattaggttttgaattttctttactgaattgagaacgaccgcggtagtattggattaaaccaaagaacatcccgacagcggctaatgagaagcctaagtgaaaatcaattttttgaccgacagccccaacaagaattggagcgacaaatgagcccaagttaatcccgaagacgaacatactgaaaccagcatcacggcgacgatcattttcactatacaaactaccaaccatttcagaaacgttaggttttaataacccagtccctgcaacaatcaaagcaattgaaataaataaagctgtcgcacccatcggcattgctaaggcaatatggcctaacataatcaagacaccaccgatgaagacggttttgaagctcccccagatccgatcacttaaccaaccaccaacaacgctggctaggtaaaccatcgaaccatagattgccatcacagacattgcagtcgtcttgtcaaagccaagaccacccttatctaaagcaaaatacatatagaataatagaattgcacgcatcccgtagtagctaaaccgttcccacatttcagtgaagaacagtgttgatagcccatgcggttgcccaaagaatgttttttcttgtttctcttccattgtaataccccactttaaaactttattattacggaaactaagaattcgatagttattaaattgaatcgactcatctatacaagaagtctcttatcattcgcttagaatctataagggctattataatcttattttaatcttaaatcaattcttttttcaacattaactgcattgtttgcactgattttttcattaaaataagttattttatgattcaaaatgactaatgcttattcttaaatgagaaaatgctcatgatacctaacatgttcttagaaaactggtttgttgcctttaaacagtagtacaatgaactaatagaaagcgagctgattccgatgaacccttttacactaacatctcttattccattacgacctgatcgttggctaacttactacgaagcaatgtatcaaaatgaacacggcgatttaatgccttatcattttgtcagtcgtgactctaacttaaccatcgagactttaaaacgaccagctaatgcctcagcggttgcaatgttctgctacaatcaaaatcactcacaggtcttactgactaaacaatttagacagccccttaatgattttgtctatggtaatcccgccggtttagttgaaccaactgagtcgattaaacaagccatttcccgtgagttaatggcggaaacaggttactctcttattgaggttgaacattgctttgcgccaagttattcctcaccaggccttactgatggcgccgttagtctagcaatctgtactcttgatcaagctaaacaaacagaccgtacacttgaagtggatgaagccttaagtaccctgtgggttaatcgtgctgaagcacagacgatcttagccaatgaaaaaatgactggacgcactcagattctattatggcaatgggcaaatgaacaataagtaatagccagttacgattttcgtaactggctattttagtggttgcttttcaatcaaattgaatattaaaaaagcattatactaacaaaacgtcagtacaatgctgattatcccgattagcacttggtagaaacatgctattgatgccggctgcaggagtcgaacctgtgaccctcggtttacgataccgatgctctaccaactgagctaagccggcattattgatgacccgtacgggatttgaacccatgataccgccgtgaaagggcggtgtcttaaccacttgaccaacgggccgaaataaaaaacgattgaaaattctcaaccgttcaatcggaataggttatactagataaaagatcagctcctaaaagatgggtttgtggtaaacaccattttaaaggaagctgatcttttttgtccgaacagcgttcggattaattttacaatctaccaaaaatcaacaattaatgccgataattcatttgcgcaactattttatttttcgtctatccgttgctacaattggtttttgaccacaaaaaaaacgaagttcagttaattcacgaacttcgttttttgtgttaaacgactggatatttattttttaaatagtaataaaagggcaatccgagtaatgtaattccgattccgattaaagttaacatcgtctgtgtgaataatgtattcaccacgatgaaaatcccaccaagaatggcgatgactggaatcactggataaccaagtgtgcgatacggacggtttaattctggttcacgtttgcgcagaatgaacacagcgataaacgttagaatatagaaaatccagatgacaacaaccaacatatcagtcaatgtattgaagccacccataaacatcataacgatggcgatactaatttgaactaaaccactgacaaccggcgcgcctgttttagaaagggagcgcagttgtcgactgaatggtaaccgattctcgagcgccatcgcataaggaatccgcatcccagtcatcgtgtagccgttaatcccgccatagacggaaattaaaatccccatagtgatgattttaccacccacaccaccaaatagcactcgagccacttctgaagccgcattcggattgccggcaatctgattgattggcaacacaagaacgaagacggcgctcactaagaggtagacaaccatggttcctgttaaaccaattaaaattgaccgcggcaaatcgcgttccggatgcttcaattcacccgcaatattcccaacgtgaatccagccatcatacgcaaagagggttgctagaacaccactgcccagcgctgacaggaaactccccgatccatttgaccgggtcacgtcaaataatgacacatgaacggcgttgctgcctggatgaattaacccgaacacaataataatcgcaagcgggattaatttaaagacggttgtgaaggattggaatagtcccccaacccgggaaccaaagaaattcaagattgttaagctgagtccgacgatgattgcaattggaatctgccagtgagctgaccaactgaataagttaatgcattgcgttgcaaaaacaatcgacaacgccgcaatgttcgctggaaagtagactgttgtttcggcccaacctaataaaaatgccgctaaactaccataagtatggtcgatgtaccgcatcatcccgccagtttctggaatcgcagctgctaattcagcagctgtcaatccagcacaaattgtgattaagccgccgacaagccatgcaagcattgtcagcccggtggagccggtcgcatgcgtcacaggatccgctttaaagaacacaccagcgccgatgaccgttcccatcacagtggctaatgccgcggtaaatccaatcgtttgatttaatgcttgtttttccgtgggcatcttaaccgcctcctaatatcatttataatatttattatgacatgttgaaagcggtctttactagtctaatttgcaactaaattcggatatgtgcggcggaaatcttccattgcaccaatcaagttcgcatcattatgatactgacacgtccgaatggttggcatgaaaggcgcaatatcgacttgcttgagtatttcctgtaaagctttttcaatatttggcaccaagaaatcggcctgcgacaccccaccacctaaaataaccgcttctgaatcaaaactatattgtaaattatagatggcttgtgcgagattatcatagagcacctgtgcctccttttgcgcgagtaaatcgccttgatcagccaattcaaaaacttcacgccctgagtagttagtatgtgcctcttgattataacggtcagccatgtgaacggcggtcccgacttcacttaaaatccgaccatcattcatcatcatgtagccaaactcaccaccgaataaatggcgaccatgttggacttgtccgttgacaatcactgaaccaccaacgccagtgccaattaccatgaacaacacattttttagccctttagcagccccactaccgacttcggctaaagccgcgcaattcgcatcattttccattacgactggtaagtcaaagcgcgtttcaagttcatcttgaatttcaaaatgatgaatataagggagcgcactggccccttcaataatacccgtcgccttgttcactgcacccggcgtactcattgcgaccccaacaacttggtcactagccttaaactccgccacaatctgcgtcagcacatcataatacgcattcaacgactttggtgtggcaacagccccttgtttggtcaattgttgcgccgcaccatcccataaaccatatttaatcgtagtgccaccaacatcaagtaatgctaaatttttcattcgtcaatcccccaatcgattctcttatgtattttgataaccgcttacattctaccataaaattacgctgggcacccacaacagtgttaattattggcgtacacgctaaaggcgaactttggtttttaatggctttcatggtacacttaacggataaggtgggtaaccacccatttcacatcaaaggagcgtcaacaacatgtcaactaacgtttgtttaatcgcaatcacaattgaataatcatgtggccattttgcggctatttctgttggcattcgctttttaaatttaattaactgagggctgtgacaaaagaatatttttgccatggcctttttttcaattgaaacgtgctccaccaggcatctgctctcggttagctacgtcagccaaataaccaacaaatcggtttttcgtctgcctatgctaatcctcagcagataaccgccggtgccgcactcttatcttaaacgtgctttcttcaaatagccgtctgcgtttagcgccatctcgtaaacaatcggcgttgccgctcatttacgagatattgctaatcctcaacggctgaccatttgaagacgcactctcacaaaaaggagatctcatggaagaaacttatatgcaacctaaaaaggttttaatcactggtgttagtcaacgccaagttaattttgactatacaatgcgcgaactgggcgaactagcccgtgccgataacttagaagtcgttggtgacgttcgccaaaatatcgaccaagctaatcacgccacttattttggtaaagggaaggttcaagaaattaaagaacgcgccgtcgctgaagatgcggacattatcttgattaacgatgaactttcaccttcacagattcggaatttagaaaaagaactcggaataagcattcttgatcggacgcaattaattcttgaaatctttgctagccgtgccaaaacaaaagaagcgcaactccaagtggccatcgccgaagcgaaataccaattaccacgcctccatccttctgaaaacaagttggatcaacaaggtggcgggggtactgcgaaccgtggggcgggtgaaacccaacttgaattggatcgccgactcatcgaaaaacggattacgaagctcaaagccgaacttgctaaaatcgatcaacaacaactcgtacaacgccgtcaacggacgaaaaatgcgattccagttgtcgcactcgtcgggtacaccaatgcaggtaaatcaacgactatgaatcgaattttacaacggttgaaccccgatacacctgaaaaacaagtttttgaaaaggatatgctctttgccaccttagacacgagtgtccgcgaaatcgtcctccccaaccaacagaaattcctgttgagtgatacggttggtttcgtcacaaaacttcctcatcacttaattcaagcctttaaatcaaccttagctgaagcagcgagtgctgatcttttaatccacgtggttgattactcagatccaaactacttggacatgatggaaacgacacaagaaacccttgaatcactcaacattaaagatatcccagtcatcgaggcttacaataaagctgatttgaaaccagatacgcgctatcctgaagtagacggaaaccaaatcgtttattcagctcgcgacgaagtagcaatcgatgcattgattgccttaattaacaaacaactctttgaacaatacccaacgctcgacttcttagtcccatacacagaagggcaagctgtttcgtacctcagtgatcgtgccaatatcactaaacaaagctatgaagaagatggcacgttgattcgtgcacaaatcaacccagacctattaggacccgttaaaaagttcgttcaagcatagccaagcgctactttgcggcaaacaaaaaagcccatcgacataaatgtcgatgggcttttttcaatttcttattgatactttctgaaaaacttatctgaagctgcttttaagctttgaatttcttttgaatcaatattcattgttagctgtgtagactcttgagcataagccactgcaatctcttgcaaaccaactaatgctttccgactgagcgtcacatagctttgtggaatctcattatcctgaacgaataataataaacctgcagcttttaaacggtcgatatcattttctgaaaccccgattgaatgaagggtttccaaatctgcgcgttaatcatcggctagttgcttaattcgttgtaatagcgcggcttcatcaagattaaactcaactttttcgcaaatcatatctagcgtttcaaaatattgcatgctagcaacactagcgtgcaatgtattgataattttatcgactgttttttctggttttaaataataaatcgtcattttattgtacccactatttttattaggattaaaacacttacttgattgccttaattctataacatttgtggatgaataaaatgcgtatattttaaatagtttaaaaacctcaattgtcaagttaagtgcaacactaatggcctattcttataattggtctagaaagttaaaccagttgtggcataacatccgctggacaactatagcttaaacagcggcggggacggtgattcagcgtgtcttgaaccaactgcagatccactaatgagaggtttttaaaggaatacccctttgggaagaactctcttaattgaccattcacattctcattagtgccccgttcccagggagaatatggatgggcaaagtagatttccgttccttgaacctgatttaaactagcgaattccgaaccgttgtcaaacgtgatagtccgaaagttttctgcaccgtaatcatcaatcgtatcttggagggcttgccggcaagtctctgcccggtaatcaggcaatttaacgataatttccatccggctaactcgctcggttaacgtcattaaagctggttcggactcaacccgtttggctttcactaagtcgccttcccaatggcccaactcctgacgtttccgaaccactgcgggccggtcttcaatggactgtccaagccgttttttattcaggcgggcatgtcggtgattcgggcgtttaacgcggcgacgtagcttcatgggtaaatcatagttgtgaagctccgggagcttgccagcctcgatataccgatagaccgtagccgttgatgggcagggaaagcccgggtaatgagctttgaaatagtggacatacgtgtcgacactgaaaactcgtggcttagcttttaaagctttcggcagggacttgaagaacacggcagcccgctgcagtaaacctttggggtgacacttggcccgctgttctcgatagtaagccgccccgcgctcggcaaagtagccctgatatgaccgatgtttctgggaatcaatctgggtggttaacccgcgttttaattcgcgagaaatggtgctgggactccggtgaagccggctggcaatctgacgaacgccaaatcctaatcgagtcagggactcaatttgaccgcgttcaaaagattggagttgttggtaatgcttaggcatgatattcttagtttgggtcatgaagacacctatccttatctgttgattttgtcgttaataataagaataggccttcatggccttttaagctagtctaattggtctagttatcaagtgttgcacttcaattttaaatcggggaatagtttaaaaatccggcgaaagataaattaaaaattttacaatctaccctgttaagtaataattgccgttatccgctaattctagtaggtagtattggtaacaataattgacatctaagaattcgttatgaatctccacctattttcctccactgactactttgttcgttcttggtacgcaatctgaaccactaattgatagggatcattgccttcaagcacgccactacgcccggccatcttgttcgggccacccgtaatccaagtatgggcgactgcaagttgataatcttgggctaggtcttggattggggttaagccaaccgtcgtaatctgcgctaacggttgtttggcaatggcgttaatccccccatagagcacccaacgatctgcttcttgtttcatttcataaaacggtaaagcaacttgattcccaatcgcataaattggtcgctgcaattgttgcgcttgttcatatatatcattatcacttaagcctgcgtaattcaagctaagatagccagattcaatcagttcgttaatcaaggatcctaaacgttgggtttgttccgcgtccattgtcagttgcgcgggcaagagattttgttcttcaaataagccagtggccggttgaatttgtgagatcacttgcgttttggcggttaccccatttagtggatgtggcgcgtttggatcaccacccagcgctttttcaacatacggtgaaatatcgatgaccgcatttttgccccgataatagaaatacaggttcatcactgcaaaatagaataacaccaaaaagacgaggaggttaatcacacctcgtccaaccgcttgagctttaaagtaggtcacactcttatatagaagataaaaatcaccaattaaacaaataactgaaaaaaggcgatttttaacgcgaccattaatatttaagtaaccgaaataatggttaataatgtctaaaaaagttaacacgataaatgtcccccttattgcgcgtaaaacaaattattactgcgtagcagtggcactgctactacttgaaaccactttagcgctactacttgtgttagcagagctactgcttgccgtggtcgtgttagctgactcatcattttgtggtgttgttgtctgctcatcatcagatgattgtgagttggcatccgtatccgtccgatcctgacttgaaacagccttagaagaggaattaacggttgattcagaggtcgatgaggattccgattcagactcagattctggttctgatgtattcatgctgctggttgaacctgtggttgcactactacttgaaacaaatgacgactgctctgtcttggtgttttcaacaggtttaaccgtatttgccacaatgttggtcgcactcattgcgataattaacgaaataatggcggctggtggaataatgggtggtgtgtgatatgccattttaacgctccctttctattatgcttggcagtcttcacagaggccatagagttcgaactgatgaccttcaatttgacaatttggaatttgctgactaaaaaaatctaacggacacattttcaattcaatcactttgccacactggcggcaaataaagtgatgatggtggcgatgttcaaaatcgcattgatatttaacgtgggcctgttcaccctctgtttgttgttctactaagccaagttgttcaaaatctttaatgttgcgataaatcgtattgtgactcattcccggaaaaatggcgcgcatatgctcgtcgatttgagtcacgggaatgtagcgattttcatatcccgataaatactgtagcatctctcggcgttgcttggtaattttgtacccatttgcgcgtaatacggcaatggcagtggttatttcgctcatttaatacatccgctcctctcgattaatcgatacgccattctagcacatgctttctaggttgtcaggcgctggcgcttgttactaccaacttcaatttagttgttaccccacactatttaccattatacccttaatcccataaccgttagctaagcacaactaaatttcaccaaattttaataaatccgaatacaaaatagttgcattatctcaggctgcgcgttatgatgtaattcagatgatttttaagaaatcgtcttcattagccttctatcagtatttatagtcatttgaagggagattttacgatggaatttactagtcaaactaataattggtatcatgtttcacttgatacgcaaactcaaaaatttatcgcaactgcaacgaacaatgaaaaaatcagcgcaagtggtattacaattgaacaagccgtacaaaaactcagttataaagtgaaacgaaccaattcggttaaccaacactcatttgcataagggttaaccatacgttaaaaggaagcctgtcgaacgcgttcgacaggcttcctttttattttcaatgatcaattttttagggttgcgattaatgttgctaaggcttgcttagttgtttcccagtcatcgttaaccaacacagttgcccgttgatttaaatgactcggtaacatcagatcccgcttaaattcagcactttgaatccgtttttgaattgcttcaggactatccttccgtttttcaaggcgcgtaatcaacgcatctgtttcagaaaccgttaagaacaagaccgatgcttcttcggggaacgtctctaaataagtctgtgcccctttggtatcaacaactaggctaatcagctgtgctttttgccacgccaaatctaacgcttcatgtgaagagccatattgatagccagaatagctcaccgattcaacgaggtgcttttgtgccaaggtgtctggtgtttcaaaataataatccaccccgtcgacttcattatgccgtctaggccgcgtggtatgggtaaccacttgtggaatttgaaaggcctcttttaaataatggctcaccgttgttttgccactacccgtggcgcccgtaatgactaatagttgttttgtcactattcattcacactcttctattcaggatttaaataaataaaaaagtttggcggcttaatttaagcagacgccaaacttttttattcttttatttaatcttataaacgacgaccaaagtcaggtttgtaatattgcattgacatcgttgttacattttggccttctgttggtgcgtgaacgtatgagccaccaccgatatagatcccaacgtgatgtgctgaaccaacgccaccccagaaaacaaggtcaccaggttgtaattctgataatgacacttttgtcccaaccgtgctttgttcttgtgatgtccgtggtaagctaatgccggccatcttagcagcgtaccaaactaaaccagaacaatcaaaaccaccaggttgtgcgccaccccatgcatacggtgtgccaatgaattgtaaggcattgccaactaatgaaccagtgtttgcaccagatggcgcaactgtcgttgtttttgcaggcgttggtgctggtgtattgtctgaacctgttttaggtgcaaccgttggtgcgattgttgctttttcagtttcttttttagcagcttcaacagcggctgctgtttgagcatctaattgactttgtaagctagcaagctgtgtcttatgtccatccacttcttgttggaaacttgcttgttcattttctgcatctgctttaagtgatgttaactgtgcttgatctttttctaactgtgcttttgtgttaactaagtttgcttttttagtcacttgttcttgttttaaagtagctaatttactttctgagttcgctacggcgtccattgcttccttgttagcttggtttaacttgccaacaactgaagcacgactgaccatatctgagaaactatcactattgacgatgaagtcaacgtaaacatttccagaaacactatccccagcacgtttttgaagcgcaattacttgttcttttaaaacagcttttctagattggacttcagcttgaactttaacgattttttgagccacttcagtaatttctttgtccgttgatgcaatgttcttttgtgcatcatcaattgcaacggtcttatttgacacttggctatcgattgaagcaaccttattttgtgcagcacttaacttagctaataaagccgagttttcagcactaaggtttgtcattgatgcttttgtatcagcaacttcatcggcactgactgcaccaatgctaaccgccattgttgacccaattgttaagaatgctagtgcactgaacattaatcgactgacttttttcactgaatgattcccctttatcatttttaaaaatacttaacttatgtacggttttccaactaagaacaagtgtaacattcaactattacagaaatgttacagcttagttaccgtattaagtctaaatcgggaattcacgctacttgttagcggttaacgcggcttggattttgacccattgctcatgacttagcaaaaccgcggtttcagtcccacttgcatcgacaatttcataaacgagcggtttgacattgacctctttgataatttggttcagcatctttttagcgtataaggcttgaatttttttacgtaacattttcggccgaaaggtttaaccttttttgttaccatcagttttttccaagagagagtagtgattaacctgcagctattagctaatgagatacttagtgttactcaggatgtttacgtggcctatgaagaaccctactagctgtgagtaggattaagctaagtaaaatataatatagcgcatcgtaattaaaaagccgtttaacagtcccttatgggatggttaaacggctttttgctatgctaaggcgtcattttctgtttcctgataacgttgcaagatgtagattgctaggataactagaattgcaccactcatttctacccaactaaagcgggcatggaagaagatgatacttagaataaatgtaattacaggttgtacggcatcaacgatactgattacggttgatggtgcaaagtttaaactgtgtaacaagcaaagatatgcgaatacagttccaatcaaaataacggctaaaattgcgataataccggaagcatttaaacgcggcggtgcttgccagaatggtcggtggatattgaagagtaaaccactgatgaacatgccccaacctaaaacgagaattggtgatttttcattaacgattggtcttggtagcacaacgtagaaagcagctgttacaccggataagattccccagattaatgaattaaaaggaattgttaaagtatggatattgcctttcgtaatagaaaggaaaacgccaattaaagcaattccgaatgagataatatcaattcgatttggccacttacgtaagaaagcgagggttccaataacgataaacagaggacttagatattgtaaaatagtcgccgctgctgcattccccgtttggatactcatgaagaaagtatattgattacccatgataccgaaaagggcgtaagcgattagccaagccgttaatcgttttgatttaaaaatggagaagatatcttgtttgaacttaattgccccgataagtaataaaattaaaccagcgccaagcgttctaacggataggaaccaagttgcagggatcttttgtccttgcgagatgaattccaaaatagtacctgaaacgccccagagtgcggacgccatagtcgcccaaaacatgcctttggcgatgttttgcggttgagttcgattgttcattgtgcgccatccttttttgaaaatttataactatactattataagctaaatggcgtatttatgctatttgcaaaacttttttcattattattccccacaaaataataaatatggcagtgataaagcgaactggtcaacaaaagctaattaagttatgatgaataaaaaagtgagggattcagatgcaatacattgcgttattacggggaattaatgtgggtggtaaacggccagttaaaatgagcgtgcttaaaactgcgtatgaagcggctgggttcaccaatgtgcaaacatacatcaatagtggcaacgtgttatttgaagccccagaaacaggcttaacaaccttagcggcaacttgtgatcagattatggtggagacctttggcttttctgtgaatatcgccgtggtcacagctgaccagttgattcaagctgttgcggacgcaccaacttggtggggcaatatgccagatgtgaaacataatttaatcgtggcgattgcgcctaaaacgggggcggaattgagtgtacatgtaggggcaattaagccagcgtatgaaaaagttgccgtgaatggtccgtttattttctggagtgcacccgtgaaaacattcggtcggacgcggtggtcgactgttgctaaaggggacctataccagtggctgacaattcggaatgccaacaccgctcgtaaattagtggcactcgcacaggcactacgggaagcatgaagtggttagactcgcatcttcattaatattcatatatacttatagtaataatcaataaagaaatgagggacgcgatgcgcttatccaatttgaaacagacgattatccagatggggttgatcttgattgctctcgaaattattgcgattgggattcaactcttctttgccccccatgaagtagcagccggtggggcaaccggtgtggggatcttattagaagaattgatggggtggaagatatcaacagtggtgtttgtgattaacatcggcatgctgatacttgcttacttcttacttgataagaaaaccacgttaagaattctctttggtagttttatgctaccagtttgtttagctttaacgccccaaatgatggtggtggaagacaaactattagcaattattatcgggagtgttgtttacgctgccggaattgccttgttatatcgaattgatgcctcgagtggtggctcaacagtgccaccgttaattttcaaaaaatatttcaatatcaaaccggcattgagtttgctggtagttgatttactagtctgctttgcgaatgtgttcgtctctggttttgagacgttcatgctggcaacttgttcatcaattctgacgttgattacgatgaactatattgagaccgggttgaaccggaaaaaggtcctctatgtcatgagtaacgaccaattacctgaaattaaagcccatttaatcgaagaatctgatgtgggcgtgacgatttttgatgttactgggggctattctaatgacaataagcagatgttgatgctcgttgttgaaaatcaagcctatcaacacattattaatcgaattcatgaagttgatcctttggcatttacgattgtggctaacgtagccgaggtacgcggcggtagtttataaatttaaaaagggtcgagacaattgtctcgacccttttgtgtgttattgatgattaaagtagcgatcagcttttaaattattgatggtgagcatgataatcaagctgatgatatagagtgttgaaatgaagagcatcacggtcatcaccgaataatgatcaagtaaccaaccgataatcacgctcgaaaatccaccgatacagcggccaacgttcataatcacgttattggcggttgcacggacttcggatgggtagaggcgactgacaatcgcgccatagcctgcaaacataccatttgagaagtagccgacaattgcaccgacgaacaataaagcacccatgctattggggaaggttaagatgtaaacgcctgctgctgaagcaatcaggaataagacaaaagcaaaccgtggaccaattcggtctagaatccaaccgaaagtcaacatgcctgctgacatcccggcaatcgtcgctaacatccaagttgatgaaccagccacactgaggtgcatttgttgttgcatgatggttggtaaccagttcattaaaccgaagtaaccagcgatttggacgattgccattatcatcagcgcaactgtttggtaagctagttcgcgtgttttaaaaagagcgctaatctgaccttttggttgatctgattcagaagtgaacgttgtactttcgactagatgatggcggataaaaaaagtaatgataacaggtaataggccgaatagaaatagtgcatgccaaccaaattgtggtaagacccacgctgctagaagtgccgcggcaatagcgccaagttgacctgcgacacccacgaaggatgaaacacgtccgagctgtttcttagggaaagattcggctaagaccgtcatgccaatcccatattcgccaccagcaccgatcccagctaagaagcgacagagataaatcatgggaagggtgtgggcaaatgacatagccgctgtcgcaaaagcaaagataaaaatggtgtaagtgaatgttttaatccgtccaacgcggtcggctaaaacgccaaaaaaaacgccacctaacaacattccaatattggtaatcgttgcgattaatcccgcctgtgttccactgagatgtaaatctgcaatgatggacgatagggtgaaagacaagaacataacgtccatgttttcgagaccgaagccggccgttgttgaggcgaccaccttagtctggtagcttgttaatcgatgttggctgtgtgccgtaatagttttcatattcagttttcctccaaaaaggacgctctctgtcgtcccttattttgcttggtgccaatcttagcacaggaaagtagtctgtgcaagggtgttatggaaaaagcgcaagcgtcctttgtgatataattgagtttataaaatggctcttcagcgatggagggcgtcatggaggctattgaatgactgataagaaaaaacactttacttttccgagcgcctacacagtaattctacttgttttactggcagtgatgatcttgacgtactttatgccagccggaaaatatgcgagtttacaatataacacgacccaggaaaacttcactgtggtcgcacccaatgggcatgaatcgacagcacctgggacacaagcaacactgaagaaataccacgttaatacggatttagcgaagtttaaggatgggtcggtgtataaaccagttgcgattccaaatacatatcaaaaactcaatcagcataaaccaaacttatttggcgcgattaaacaatttctgaatgcgcccattcaagggttatctgaaacaatcgatattatcacatttgtcttaattctaggtgggattgtgggcgttgtgaataagaccggtgcatttgcggccggaatggcggcgctatcgaaacgtttgaaaggtaaagaagcctggttaatcgtgattgtaacgagcttgattgccctaggcgggaccacctttggcttggctgaagaaacaattgctttctatccaattctagtgccaatctttatggcagctggctacgatgcgctagtcgcaattgcggcgatttatctaggcagttcaatcgggacaatggcttcaacggtgaacccattttccgtcgtgattgcttctaatacggctggcattagctttacagatggtatgggactaaggcttgtaatgctgattctaggcacattaatctgtattttctacacgattcggtatgctgaaaaagtaaaacaggatccaagccaatcgctcatttataatcaaaaagcagaattggaaaaacatttccttggaaatagtgatgtcaatgaagtaccacggtttgatttccggaagaaattgatgttaattatttttgcggccggttttgtcatcatggtcttcggcgtgaaggaatggggttggctatttaatgaaatttcctcgttattcttagcgattacgtttattttggcgtttatttccggattatcggaaaaagattttgttagtgaattcgttgcaggggcttccgacctgttaggtgtagcccttgtgattgctttagcacgcggcgtgacgattattatggaacaggcacaaattagtgatacgctattgtactggttaagtagtggcgtttcccatatgagtggtgttatcttctcaacggtgatgttcttcgttttcattctactaggattcttcattccgtcgagttccggtctagcggtgctatcaatgcccgtcatggcaccgttggctgatgtagtcggtgttaatcgtgacgttattattagtgcttataactggggacaaggcattatgtcgtttatcacgccaactggtttggtcttggcctcgctggcaatggtccatgtaacgtttgataagtggttaaaattcgtttggccattaatggcgattattggtctattagcaattattttactcggtgttagtgtctatctttaaaaaacggtcaaaaaaggtccgccacaatcgtggtggaccttttttcgtgattagtaaactttaaatttcgttactggccagtagcggagtttgacaacgccttgaatcccgttgaaggttttagaatcatcactgacaaagcctacttcttcataccggctatcctttgaaacagtccggttatcacccatgacgaagtagtggtgggcagggactgtggaacgaccaagcacgtcctttaaatcaaagtttggcttattagtctttgggttgagtgtgaagtagtttgacccggctaggaaggttgttggatcttttttatagtcatttaaataaggctcactgacttttttattattaatatagagttgatccttgttgaagcgaacagtttcaccgggcatgccgacaattcgtttaatgtagaattcacctggtgaatcaggggccttgacgataacgacgtcgccgcgtttcagtttcgtatggcgtagtgcaatgacccgatcatactgtgtaaagttgggttgcattgatggcccgaaaatttgttcattggcaatgacgaatttaagcagtaattgcgcaatgccgaccatcacggccgctaataaaatgatttgtatagtggatttccaaaattcttttgctttagctgacatatcgcacatccttagaattcaatagattcattgtactacaattaattggtagatgacaacaaaactgtacagttccttaactatttaaacgatcttttaaattaggggaacgccgcgttatttatcacgggaaacggttcgtggtatactgaaagggattattttaaacgacaggaaaagtgagtttaacgcatggcgaatttagtaattgtacgacatggcgagagtttagccaatcaattaaatacttatactggttggtctgatgtgccattaacggctgctgggcgcaaacaagcacagcatgtgggccgacaaattcaagcaaccggaattcaattcagtcatgtgcatacttcgttattgaagcgtgcaattttgacgagttacattattctggatgaaatagaccaattggccattccaatgacgaagagttggcgattaaatgagcgccattatggggcattgcgcgggttaaataaggaaaagacgcgggctatttttggtgcgcatcaagttgcccgctggcggcgtagttacacggcggtcccacctttattgacgactttttcgcaggcccgtcgttatcgactagttccaccgatgagtcggccacgcggggagagtcttgcacaggcaacgcaacggctattaccttattggcaagatcaagtagtgccaggattacttgcaggccaggaccaattgattgtagcgcatggttctactttgcgtgcgctcattaaggtgatcgaacagatttcagatcgcgatattgatggtgtggaagttgaaaatggtgaagcactgtattatcgattcgatgctcaaatggtagtcattgagaagggacgattagcggactaagcggatggacaacaaattgaaaagaggactgctgttggtagggctcatcctactaattattggcggcacgatttatcatgaacggcaaaaatatgccgtccaaactcaacaaacccaacaaaaaatgaaacaacttcagcaacaattacaggcaacaaaacttgagttagccattcaaaaggcaaaaagtcatgaagccgggattgatgatcgaaccatcaatcatttgagtgcgaaggaacaacaatttgtacagcagttgctacatgataacagttttagcgggaccattttaattgtgcggcggaatcatgtgttatttcaaggtggccggggctatgcaaattttgcgactaagcaactgaattctccacagacgacgtatcagattgcatcgattcaaaagtcattaacggctgcgttattgatgaaacaggtgcaagccgggaacatcgatttagcgacaccgttaagtcggtattacccgcagattaaagaggcggatcaaattacgctgaagatgatggttgatatgcgttctggactgactgaattatctgcaccagaaaaagaattatcagatcaagcgcggattcaatatgcgcttgatcatttggctgttaaagatattggtcagcataattattcgccagttaattaccttcttttggccgggattttagaacaagtcacccataagagttatcgagagttagttggaaatcagttgataataccgtttaaattaacatcgtttaattttatgccaaatgaaacgaccggccaacaagcgactgcttatggttatcaacaagacggctatggcacgccagttagtgaaccaagttacgtatatatgcgtgagttagggaccggaaatatgtatgccacaacgagtagcctctttcgaactgaacaggcgattgttcaaggaaaagtttttaaaaaatcgttattaaaaacgctccgctcatcgactactggtgaatatacgggtggtgtttataattacaaagattattttacaagccatggggtcgaatctggattcgaatctagcttgcagatgagtcaggatgggcgttcaggaattgtcttattatcgaatcaatataaggccaatccttcaatcggacttctaacgaatcaactttataagcagttaattacgctcaatcgttaaaaaagcagcttggcttaatgcctagctgctttttgtttggactgtaaaatgatgttgtgcaagtgtccaaaggccaaacccaattaaacagccaaaccagtttaagaggatatcactgagtgcgaaagtccctagataaaaggcgaattggagaatctcaatgcctagaatcgttaagagcgctatgatgttcgtttcaacaaatgaggctttcaaatggtacaaaccgcctaatgggatgaagtaaacgacattcagtgcggcttcgagcagtgttttgtgatccttttgaatgaaatcgaacgggttcaagctaactgcatgatagacgtttgctttagtgaataagacaatgaataataagagcagatagacgctgtagacgagataaccatagattggcgatagttgtcggcggtcccattgcacccagcccaaccaaaatgtaagggttaaaaatagaatcagaaaaagcgtcgttgctggaaaacgggccataacccgggttaagcgtggataactgttgagtgttggtaagacaatgtgccacacgaagtagcgacttatgaggtaggcgaccacaccggctaaaccatattcaagtatcttgcgcattacgattcctccagtgattatagtttggtttgggcgaggcgtttagtgaattcagccataaagtcaaaatgttgtgtgtcggctaacgtatcttctaatttatttagaagttcgttgagcgcttgttgttcgtcgggggttaggctaccgaataaagtctccgtaaattcattgcgaccatcgagggcttcttttaaaaccgctcgaccggccgctgtaatgaagacgtgggtgattcgccgatcatgatgatcgggccgccgattaatgtagtgtttagactctaatttgtgcaagcattcggttagggatgaaggccgaatatcgagactttcggcgagggctccctgcatttgtccgttttcgatattaaggcgttttagaatgcgaatttggctgactgagcgatgatcggatgaaaattgcatgccataataatggcgataatggtgaatcaccttattgaaagtttggaaaagctcgttagatagctcggtcatggggactccttaataaagtttaatttgagatgctaatacgggtataatacgtcatttcataaggtggagcaatattgctcaggttttatcaagattgttgtgaataattttacataataaccgcaaaaaaaacgatggttaaactgagtcagttctaaccatcgttttggggttgttattgagctgcctttaagaaatttaatgcagctgcataatctggttcgtctgtttgttcgataattaattcggtgtagctaattgtaccatctgcttccaaaataaagattgagcgttgaagcgtgttgttgcttggaacgtagagttgcattgctttcccgaaactgagtgcctcatcagaaaggagttgcatgttcttaacgccttctgcagcgcaccagttattttgttgttcgatggtgtttgttgaaattgtgtagaaatggacgtcttcgaattgatcgacggcttggttaaaatgctttgtttgaatgctgcaaacacgggtgtcaatgtctggcacgacgctaattaaagtccgtttaccgagcaattgcgcagaagtcaccgtttcgccagcggcatttttaaggtcaaattggggtaactgtgtgccgacggctggtggtgtgccgattgtatcgagtggttgatcatgtcttgtgatttgcatttgcataaacctcatttcataataaaagatgcttttattctaagctgattgtgctgagaacacaattaatcacgctcgaggagtatagaaaattcaaaataggttatactagacaaaagatcagctcctaaaagatgggtttgtggtaaacaccattttaaaggaagctgatcttttttgtccgaacagcgttcggattaattttacaatctaccaactcaaaaaaatcttcttttgataaaaaagcataaccggttgttctgaaaccttttaacaatctaaaagcggttttagcataactgcttcgaagatctctaaattccgctaaagcatatctaacccacgtgtctaaattgttaagaagtggcaaagcatctttatatacttcaatgtctatataaggagaatcagtttcaccaacaattctgaatttagtaaacataacaaacatttctctatttaatccagatttactacgtcttccaaaatgaagtcccattaacttttcataagttctttgaatatcatcttcaaagcgattatttgcagtcggtttgtagttgctcaaatctttaagttgttcaaaagaaaatctaactgtctgatctcccttatcacgcatacgagaaataattgaaaaaaatagattcatttcaataggggtgaatttacgtaacggaatggtattaagttcaggatcatattttataagttcattgctcataatcacacctccacaactattatataaaatcaacgattgtttatcaacgatcaccattaaaagcctcgttgataaacagacaaaacctcgttgataaacagacaaaacctcgttgataaacagacaaaacctcgttgataaacttctgtgagccttggtagagtaaggcgcaagaggggtctaaaagaggtttaaaagaggtttataaaagaggtataaaagaggcaccgctgtacgagattaaaatctaaaacaaaaatacaaaggagtgagcccaaaaacgggctcacattaaactccactcgctacgcttcttgcgcctcactttgttcgttgcttaaaaggggtggcaagccacatttaatcgggcgctaacgccccgaacccccgtccaagctgagccagcttaaccgctttttcactcgccgttaggcaggaaagcaaagttttatagaaactttggctttcgccaattcagtgttaagactggtttagagctgtcaattccttatgctcccacgctacgctcgtccgctaccattgacagcaaacagttagtttttttgaatcttaacaagaatctaactgctatattcgtttttaagggccttatttctcgtttctagcgattttgagactgtttatatatatttataccaaagcaaaaataaaaagccctcagcaggcttttagagggctaaataacgaatccaggatgattaataatattttcttgtcttttttgcaaaatataagtgtataaggaatcatacaaattctttttaatctcgtcaggttcattgacagaagcttcaaacaattcttgaatatcaacttgccaaggatcagcaagcatttcaccaattggttttaatactttcttttcgtccatcttaatgactcctaacgtcaaaataatgctttcagtttaaattcacagatcttacagcaccgtcattcaaattttgttaccaagcttataaagattatctgcacaaagcaattaaaaaattttggcttaaaacagcgtaatctgcaacactttttaagtatctaaagcataacaaacttagttaagtgcaagtataaattgaattaaaaatacattcagtttaacaacagcaaaaactgattttatggttatcagcagaccgagtgaaacgaggtcaatgcgcacttacacaccacaattaaaattgctggtgtttgtgctaaatttcctgtatcagaagtcgccgttggcgacaactaaaaatccaaataaaactaaccaaaatcaatttgatctaacatactttcggtactggcttggtctaagcctaaataagctaaagtcatggcttcactggaatgatttaataagtgcatgaccaaaccaatattataattagattgtgtgtagacgcgataagccccggttttgcgcattgtgtgggtccctagataattaattcctaacagatcgccaaccttactcataattttgtagaactgtttttccgtgatatggcgctcagggtgttgaatggaaggaaagagccactcagaggctagtctatgatcaagtagccattgacggtacaataagagctctgtttgaactggtttaagatacaaggtattcggtttaccagtttttcgatcgtgaatgaacgcattttgtttaatagaaccgtccggattaaaaatatcggcctgttttaagcgcatgacatcactgactcgcagcagtgtcgctttgccaacttgaaaaactgtatagttacgccggccagctttaaagttgttgagtaaggtatcttgaacctctttgagaacgtttgaatctttgatgggtaagacaacttgttgcatagtttgagctccttaaaaaattgatttttagtacaaattaaagtacaatattaagtacaatgaaagggtggtaaatatgacattagcattaacacagagcgattttcgcgctaacttaaaaaaatatttagatcaagttaatgacgaagacgaaaccgtttatattgctcgttcaaatagtcgcgcagtggccatcgtttcacaagaaaaaatggattggctagaacgagcattaaaagctaaagaaggctcgttagaatatgcaattgcacgtgatcagttaattaaacgccatgttttacctgacgatgaaattgttgaatcagatgatgattattggggtcagtttaaataatgaaaaaactaagatttaaaccacgtgcaacctttaatgctgatctaaaacggttagccagtttagacaaatctattattgatgaagttcgagcagccattgacctgttgcttgagcagcaacaattaccaccagaatttgaagatcatgagcttaatcggcgaatgagcggttataatgaatttcatttacgagacaccccgaaaatcaaaacacccagcgaaactaacgatgtcctggtggtttatacgattgatacagatgaactagtcttaattggcattcgagtcggatcgcatgatcgtttatttcctggtcaaaatcgttctaaaaggtatcgaaaaaatgacgaatagaagaagtcatttttataatatgaaaataaataacccctaatatctacattatagatattaggggttattctttcaatatttttgagaggcgattttgtaaatgcgccatcaaaaatgcctcctcgaaaaaggttttccaagaccagtataacaccgttaaaaatctggcatagcctgttataccaaaataatattttggacaggctctgcgaggcaagtaatcgacaagcgattacagtagcgttttcccttccttctgggaaaactgttattttacagcgcctattatccggctcgtaaaacctccggcgggtcacgccgtgacagggcaatttaccgttgcatggtcgatttcatcgggagcatgtcatgcagaacgctacccgcgtcgggcaagctggtgtcagcttaaccacattaaaataatctgtaaacgtaagtgtataataaaaataaaatttataaggatggattaaacatggtagatttatcgtatgatcatttcggaatcactcgtaaaataacagaattggaagctgatatgcctaagaattggctcagcttcgtgaattctaataaaaacttgaactatatggagaagtttggtgtagtggctattttacaagcattacagtcttatggggggccaactaaagctgctcttgtcaaagaaaaggctgttgaatatccttattttacagatgcagatagagagaaaaagtctagtaatggtcaaagtcagttagattttagattgcagtggtctatgtctaatttaaagaaagccggattactttattcaccacagtggggagtatgggccttgacacagatgggagaagacgttgatataaataattttgatgtatgggacgatgtatactcaatatctactcctgtttggcaaaaaaataagctaaataatcaaaaaaagaaagatgaaatactatcatcttcaaatgtcaatattgccaatctggacgaagacattgtagaagaaacagatgattctgaattatggcgagatcaattattacagcgattgagtgaaatgaatccatataagtttgaagaattgattgtaaatcttatgcgaaaaataggcattaaaatggataccacttcaaaaacaggagatagtggcattgatggcataggttatttaagaacccctgagttgatgacatataaaattgtgttacaaactaagcgatttacaaaaggtccggttacaggaccagatatcagtaattttgctggtaccattagtggtcataatgcagacagagggatatttgtaacgacttctacctatacaaatgatgctgtcagtagatcgcgtcaaggagctaatttaattaccttagttgatggtgatgaattagtagatttattatttgaatatagagtgggcattagcgaaaaaacagtcgttgttatcaatgaaaaaatatttccaaaagattaatatacagtctgcactagtttgagataaaaagtgttagctttacccgttttttggtcgtggataaacgtattttgcttaatcgtaccatcggcgttaaagacatcaacctttttcagctgcatgacatcactgacccgtagtaaggtcgctttacccagttgaaaaatggtgtaattacgccgaccagctcgaaaactatccaacagcgtctcctggacacttgttaggacgttagaatctttgattggtaaaacaagttattgcaccataacctagtcacctcttttttaagcattagaatccaaccattataggcgttattttaagtataatctaaaaaacagcccctaacaaatcaacttggtttgttaggggctgttttaataggttttcacaggggcgatttgacatttatagaccctgaactattcttggacttcaaagtctggtaattcatcaatcaattcaagcgttcgcatacttactgttataacagtaagcaaaagattcaaaatatacttaggatcatcgctgaaatcattagaatcatctgtgatccctgacttattatctgttttcacttgatattgatcaataatccattcaatagcgggtcgaccgtttacaacataatcatatgctctttctggaatgtttttaatcgtgatactcttgttgtaaataatagtagtgtatcacaaattatggaaacacaatatacatatttttgtcaaaagttaggcgaaattttcagggagcagtagattaagtagtacaatgtagatatcgagttaaatggagggaattcaatgtataaagcggttgttttttttgatctagatggcacactatttgataatcaaaagaatgtttctgatgacaacattgcagcaattaatcagttacgagagaacaatattctccctgtaatttcaactggccgaaatatttttgaaattcaatatgtgattgacgctaccggtatcaattcattagtcagtgcgaacggtagttacgttcaatatcaagggaaaaagctaaaggctgagcaaattagtgatgaggtgattgaagagattttagcatttgccaaaaagcagggcgatgtgatttcattctataacaatgaagaatttgccttaacagctgaaaatgacttaactaaagttaactatcggctgttaagattgacgccgcacgttgagccggacttttacaagactcatgaagtcaatttcttgaacgtttttaattatgataaagataaactgtatcaggatgaattcaagggtgaattgtcattggttagaaataatcctcgctgtttagatacgatgaagtgggggatatcgaagcaaaccggcattcaagcactcttgaagaaagcgcaattaggggacattccgtcctatgctttcggagatcagctgaatgatttgcaaatgtttgctgaagtggattacccagtcgcaatgggtaatggtcacccagatgtgaaagccaaagcatcattcgtcactacttcaaatgtgaatggcggaattgtgaatgggctgaagcattacgggttaatcaaataacttacgatacgcaatcatttaagggcttcaccctgaaatcctcgttttggatttcagggtgaagcccttaaatgatgggattaaagcatcaattgtcccagttttccaaatggattgaattagtccatctgttttttaatgttagccaaggtcatttcactggtatcagtaaagttcacatctgcatccttcaaaattgtcttgtcaccaattccaatggaggtttccccagcggcgttaattgattcaactccagcggcagcatcttcgactccaatgcattgttctggtttcaaattgatcagttcggcacctttgaggtaaatttctggatctggtttgcctttgctcaaagtttttggatccacaatctttggaaaataatcagtcaattgtagcttcttcaaaacagtaggagcattttttgatgcagaagctaatgataacagataaccaccatctttaatttcatccaggaattctttaatccccggaagaatattagctggagtcattttgtcaaccaacttcaagtagtttgtatttttttccgttgcaagatcaaccttctgatcgtcagtatagtggtcttgtagattacctgcttttaaaatcatttcaagagaatccatccggctgattccctttaatccgtcttcaagttctttggaccatggggcacccaccttgtcagcaacttgatgccaagcttggctgtggaaaaccgaagtatccgtaattacaccgtcgagatcgaagacaaaacctttaatatctgaaaactttgccattgtatttcactcctaatcttatttgtaagtaataacagttggcttgttcttggataatgaataacccttgtcaccaaccttgatgtgactgctcgaatcggcagtcacattgattttatgatgaccgatttcaaaattgtacgtgatgccttgatacgtttgcttaaatgatagcttactccaagtggttggaaggtgcgggttgatggaaacctcgtcggtgtcaaaccgaaccccgccgtaacacttggtttcaatttcaagcgtagcacccatgacgccaaggtgaataccttcagcagtggtcccaccttggatatcatagtaatcggagaacaaggcggttgagaacaattgccaggatcgatccatattgccatccatttcatccagaactgaataaacaattcgtgaaagggtggatccgtgagtcgttcgatcaaggtaaaatcttaaattggtggtaaagtagttggcgggcaacttgtaaccaagccgggtaatgacgttttgaacttcatcaaatggtaattcgtaataagccatcaaagtgtcggcttgtttggcaacttgataggaatcaggtgaattaccttcaccctttaacagtcgatcaattcgcgatatatcaccgtatttcttccggtaagaatcaaagttgagcttggaaagattgaagtaaccggaaaattgaccaatgatgccttcttcgttgatatcgagacgaagtttgtgggcaatatcactcatttgatcaagtaaactattgtctgtttgggctttttcattggcagatttgattatcttaggatcttcatgactcatcagctctgcgactttatcaaataaccaagaaaccatgatattggtataagcattattagtgagtccgtgatcatcagagtttggatattcttcgtggaattcatctggtcccatgacgtgatgaatatcgtaacgatcatcttttttatcgtagcttgccatgctgacccagaacttgcaaattgacaataacatttctaatccgtagttcctcatgaattcggtatcacctgttagatgaacataattaatgacatcgtaggcaactgacagtgaaacgtgacgttgcaagcgactgttatccggatcccattcaccactaaccgggttcaagtgaacaaattgagattgttcatccccatacatccctgactgccaaggatacattgccccttgcttgtcttccgaggcggcgtatttgcgcgcttcaccgattcgattatagcgatataacaagcactgtttagcgattgctgggtaatgaatagcataaaacggtagatcaaaggtgacatcccagaagatgtggcctcgataagcttcaccgtgtaagccacgagcgccgactgaggaatctaattgaccagaagccaaggcggcacttgtcacaagcatatggtagatgttaacccgcgtcagtttttggctggtcatatcattatcaatttggatatctgaattctgccaaacgttgctccagaacttttgactgtcggcgagggtgtcattgaacgaagaagcgttcagttccttttgggcgggttgttccaagttggcatcctgagtttggctggtaaatactgtgacacatttttcaaatacatacgatttctcaggttctacttggatatccaatttttgctggattgatttatcttcagtttcagctgaaattaacttggtggtatcgatatctttgctagaaagcttagaattaatcacaaagttaacgtgggacgtcttggtttgaccggttaacgaaatctggttatcgcgggcaaccatgccaatgacgtcgatatggtgttgatcgaaaccctgatagcgctcaacattgccattaataacagtcccgtcaatttttgaatagagttgaatgctcccagaaaagttgattggttttaattcatacttgatggaataacgatgccaatttgtcatattggcaactttggtagcccgaacttgcaaaatgtggccagttgataattgaatatgcaaggtggttgttaaaacaccggttcgcaaatttaggcttcgataaatatcttgaatatcttcttttttaatttcaaacggttgttgatgatccaccccaaaactgatgtattgagcattggggaggtttactagatcttcgttgacaacatcccgaccgttaattttggttgtgagttgattgtagacaccagcaacgtacatcccagggtaattatcctggttggcgttcgcttcgacatacgcaccccgcaggccaaagtagccgttaccgattgtcagcatggcctcttgcccatagttacgcttgccgctgtactcaccataataatcaaggtgccacttcaaatattcctgtttttctgccactgctttttccaaaccaacatcttgaaccttatgcaggttaacgaccggaatattcatcatgttggcaattgctaggccaatatcgatcttttgatgattaataccgatgatcgtgtcagagaattcatagttcaatgaatcctcaataattgctgcatcaattggcaccccagtgagggcagccttaatgttctcaagattatcgccaattgaaaatttggggttgtaggtgatcataaacttcctaaaagggggcttattggaattctctgaataattgatttccatgaccccatcacgagcccttatcgcaaacgttctcataacaaaacctcttctcaagtatttccatttgtgaaaatcatttataagttaattctagttcaaatatccggtaatcgcaattaattggggtttgaaagtaatttgagcaagccggctgttttcatttttgctgattttcgagtagatctttgatttctgaaagcaggacttccttgcgatcaacactggcggttttgggctgttttttaactatccgattaatgatttatttgagctgtggaaggtaaacgcggttctgaatgtctcttaaaacctgtctcaaatattgacttcaatccagatcttttttgtccgaacgctgttcggacaaaaaagatcagcttcctttaaaatggtataaggcaaaaattccgccctcacgcttattatcggcttgcattgcaatgacaacatacttcaacgttgtaatgatcattaatgtccaaaaaatcaacgagatcgatccaatcacgtaatcgggagaaatatttcccattttaccggcgtcaccaatcaatgcattcataacatacaatggtgaagtgccaatatcaccgtacacaattcctaaagtaacaagtgcccccgcaaaagaaacacgttctagttgcttattcataattacttgcctccaaagtcatttcttgaaatatggcactgaaaaatagtaagcctaaacactaagaaaagcaactatgccatatacatcataatgaaatcactttaaagaagttcataatttacgatatactgattgaaaccataaattatgggtcttctattcttaactatctagttgaaccatctgataaccgactccaatgtgtgttttaatatactgattctgagtattaacttcaatcttttttcgcaaagttgcaatggtcactcgaagagaagatgtatcttcaaccgattctgtcccccagacctctttcaacagatagcggtgtgtcaacacgcgggaagtgttttcagcaagaataatcaaaaccttatattcgattggtgttaaatggatttcattttggtttactttgaccgtttgtgaatcaaagttgatagtcaattctccattacaataattattaatattggtttttccgttgttatatattatgttagtccttctcaaggaaacacgaattctagccagtaattcatcaatagaaaagggttttgttaaataatcatcagcacccaaatctagagcctgcactttgtcggcgtcctcatcacgtgctgaaataacaataataggtatattattgttggcagctcgtatttgcttaataatgtccatcccatccatatcgggtaacattagatcaagtaaaagtacatctggttgaaaaattggaataaattggagcgttttattgccatttctagctatgccatacttataatctgcggatcttaatgtcatttgtattaatcgagctacttctggatcatcttcgacaatcaaaattctatttttcattttttttgctccaaataggtaaagtaaagtaaaaacatacgccgttatttaaatttttagcccaaatattaccatcataagcttcaataatagatttacacaatgataagccaattccaagccctctttgagcccttaagggttgcttttgtttgccagtgtaaaacagtccaaataggtgagccagatcaccattagttaattttggtccgttatttgaaatctcaaattggacttgattggtattcttttgaaaaattctaatcgaaattttggttttttccggtgtgtgttgaatagcattgttaactatattaataatgacttgggtaattaagtgtgcgtcagccatgaccattaataatggatcagacaagttaacggtaatcttatgatcttcaaatcctgggctaagatgttgcaaagattcttgaataatatcatcaattaactctggagaatgacgtacttgaagactactctctaaacgagtcattgccaatagattctccactagactaattaaccatgaagagtcattaaatattgattcatataatgtatacttctcaacatcactaagcttatttccttctcgtttcaatatatctgcactaccagaaatatttgttaacggtgttcgtaaatcatgggagattcctcgtagcaagttagccctgagtttttcctgatgcgatttaatttcagcttttcttttttcatttaggattctcatccttgataaggcttgaccacattcatccaatatcgaaataattaaattacgatcaaatatttccaaagatcgttttgaatttattgctaagcctataaccgcaacaactgatgaaggggaatttccaaaaataggtaaatataaacactttgcttgtggtaaagtattagtagttaatccagcttcttgaccattcttgaatgcccaggttgcaatggctttctcgttatcactggaaaactcataaaaagagctctggctttggtttaacagataaattttaggttgcagtaacttagaatcctggcattcataaaagaccattgtagcactataaattttttgtagttgttgaacagtcgtgtcaataatatcggttgataatttggcttgttgcaatttacgaatagtttccaacagcacctctgtttggtagacacggttagagttatattgaacttggtgcttcaattttagtgtccaataattactgattattgaaactagtagcattaaaaaaaatgtcaacaagtaaactggactactactaagagaaaaatagggtttggtaaaaaataaattgaaactaattactgctaaaaaagctgataagaatccatatacttgatcttttaggttaattgcgcagagcatgatccctaacatataaaccaaaacgacatttaccaatggtacttgtgcaaatattaatagttctccaaccactgtgcttcccaaaataatacttgaaatcattagcatatttttagccatgcgcttagagccagacttactaagtgaacctttaaaatgggttaaaaatgtaccatttaaatgttggacttgattcaaattagttttagcactattaattacatactcatcaacttctggtaacagatatcctatttgatacacaagtgtagatcgtgtttgccatatttttttataaggactagccccaagtacaattttggttacgctgctttctttggcatactctgtaatttgcagagctgggttctcaccctgcaatttaataacctttgcacctagttgatgggcaaggctaatgttattatttaagttttcctcccatttattaaactgattgttcttaacataaaccgcaatgaagtcactattaaaagcttgagccatttgtgcagcagaacgaatgacacgttcattactcttagatccggataaacagactagtagccgatcagtacctacctttgagttggtagccaatcttaaagtcattttcctcaatgcaagttctcttaacgtagtaagattttcagatttaaaaaaattagctaatgcttgccttatatgatttctagcatatatttttccaattttaagtctattgatcagatcattgggttcgatatcaattaacttgacctgatttgccatatcaaatatataatctggtactcgttcttgaatatcaacgtttaattgttcaaaaattatatcgtgcaggctttctagatgttgaacatttagcgttgtataaacattgataccagcagtaagtaattcctgaatgtcttgataacgtttcaaatggcgactttttttcgtatttgtatgtgctaactcatcaactaaaattgtctgtggatgtcgttccagtgcaccatcgagattgaattcttgaagatacattcccttataggattctttttttacagggattgattctaaccccctagcaagattgcgtgtatctgccctgccatgatcctcaaggtatccaataatgacatcctggccctcctgcttcaagtcctgtgcttctgctagcatagaataagttttgccaacaccagcggcataaccaaagaaaatctttaatttccccctgcctgaagtttcaagatttgcatcttttaagtacctacttgcacgttcattttgattcatctagttatccctccaaatagaatacaagaatatccttggtaagtatactatcgttctaactaaatttacccaaaaataaagtcttgtcttttataatcttcaaataaagatctttataggctctattacatatgacacaaaacccctaaatgattatcacatatggtaatcatttaggggcttaacccgcgacttatctcagctaagcttcaaaagttattttgatagtttatccaaggccagattagtttctagcacgttaacccgaggttcaccaagaattcccagagtgcgagttttggtattttggtcaatcactcgttgaattttttgaacactgacatgccgagccttagcaattctcttaacctgatatttagcagcagttggtgatatttccggatctaagccacttcctgaattagttactaggtcaatgggaacatgtcgataagtggcattaggattcaatctttttattgtcttttctttatcaataatctccttttgataacttttatcgttagggctcatttgtgaggccacagagtacataatatttttattgtttttttgtccagttatatcgccaacagtaatatccatctgtctaccccacaggtattttttgcttgtgaatggttgtgcaattagtgctgatccccttactgtttgatcagatctaactaaactgccatttgcttgtgaggtaaaaaaggtttgcccaattgcactaacaattaaggtatagataccacaaataatcgttatgacaattactgccaaaattgacttacctaatgtcttaactaccattattgtctttctcccttctcatagaatctgtagtatgagtgcaatgatcaagtcgatcaacttaattccaatgaatggaacaactatcccaccaagcccataaactagcaaattatgccgcagtaactgactagctggaacttctcggtaacgtactcccttgagtgccaggggaattaaggcgacaataattagtgcgttaaaaatcaatgctgacaggattgcacttgttggactatacaaatgcataatgttaagcacatttaacttgggatataatcctacaaacatagccggaatgatagcaaaatacttagcaatgtcgtttgcaattgaaaaagtggttaagcttcctcgagtcattaataattgtttaccaatttggacaattttaattaatttagttggtgaagaatctagatcaaccatattaccagcctcttttgcagcctgtgtacccgtgttcatagctacagcaacgtcggcctgagccaaggcaggagcgtcattagttccatcgccagtcatggcaactaaatgtcccttattttgatattcacgaatggttttcattttactttctggagtagcctgagatagaaaactatcaaccccagcttcagcagcaatggcagcagcggttactggattatcgccagtaatcatgattgtctttatgcccatcttccttagatcagcaaatttttccttaacgccgggttttatgatatctttcaagtagataacaccaagaataacaccattcttgcatactactaaaggtgtccctccctgttcagcaattctcttaactgctatttggcattcttcgctgtatttatttttttttgtcaggacatattgtttgatattctccgaagcacctttacgaatttcatctccagcaaaattaacaccactcattttagtttgtgctgaaaatggaataaacttagcctgatttgcttctaagttctgttctctaaggctatacttttcttttgctaatacaacaattgatcttccttccggcgtctcatcagctaaggatgaaagctgtgccgcaattgctaattctttttctgaatggccatcgactggaataaatgctgaggcacgtcgattgcctaatgttattgtcccagttttgtccaggagtaatacatcggtatcgccagcagcctcaatggcccgaccactcattgctaaaacattagcttgattcaatctactcatgccagcaataccgatagctgaaagaagtgctccaatggttgtcggggctaaacaaaccagtaatgcaattaaccatacaatagacattggatttctcatatcaagtatctgagatgataactgagaatacgtgtataataccgccactaccaacacaaatatgatagacaatgcaactaaaaaaatttctagtgcaatttcattaggcgtttttttacggttagcaccttctaccattccaatcattttgtccaaaaaactagcaccttgttcttgtgttaccttgatgaccaaatgatctgataaaacagtagtaccaccggtaacagcagagcgatctccgccagcttctcgtattaccggcgcagattcaccggtaattgcactctcgtcaacagaagcagctccttcgacaacttcaccatctgctgcaatggtttccccagcttcagcaaggaatagatcacctttatttaagttttctccactaactttttcaatatttgataaatcgccaactttatttaacctttttgccattactgcacgttttgattttttcaactctgccgcttgagctttaccgcgcccttcagcgacagcctctgaaaagtttgcaaacaggcaagtaatccaaagaattacagctactgtaaagataaaaccactacttacaattctgtctgagatgccaaaaagcgataaaataaataagatagttgttgcaattgctgatacataaactagaaacatcactggatttttaatttgtaggttaggctttaacttaagaaaagtttctttaagtgccgctcctaacatttttcggttaaacatttgatttttctctattttttcattcatagtcagacccaccttactaattttagaaacgcataatgtaaaatcatattaatgtgtcaaaaagtccgctattggtcctaatgatagtgctggaaagaaactaagcacgccaatgattaatacaacgattattaacataaaaacaaaggttggacttgtagttgataatgttcccgaactactagcaacaattttatgctgtcccattttaccagcaatcgccattatagcgataataggaagaaaacgagaaatgatcatcgcaacagctaataaaacattgaaaataatggtattaccattgaaccctccaaagctggaaccattatttgcccctgctgatgaaaaagcatataaaaattcagagaatccatgtgctccactattgctaagactagttaaagtactctttaacattgctggaatagcactgcaagttaaaattgcaattggcgttgataggcaagcgataacagccatacgcatttcgtaaggcccaatttttttacctaaatattctggtgtacgtcctaccattagcccagcaataaaaactgttaggatgataaatccaagcatgccgtacaatccagatcctacaccaccaaaaacaacctcgcctaattgcattaaagccatgggcattaatccgcccagagaactaaaactatctaatgttgcattcactgcgcctgtagatgttgcagtagtaacaatactccaaacagctgatccaggaataccaattctagtttctttgccttccatagccaaattaccaatatgagctaaagtgatcccatgttgttcaacaattccttcaaatattaacgcaactacaaacataattgccatagctgagaagattgcccaaccttccttacgccgctttaaagattcaccaaagctaaaacatagcgccatgggcagaagaagcattgccgttgtttcaataaagtttgtaaaaggtgttggattttcatatggatgggcagagttagcacctaagacccccccaccattagtccccaataacttaattgatacctgggaagcttgtgggaataacggtaaggtttctttagttataatttttgccccatcgattttgtgatttttaatcctaactgtattttttttgacgttaatttcagccccatgaatcgcctggttatgtttatcaacggcaacaggttgtaccaaggtagcagttttataaccaccagttgtttgaggaacaccacctgccatgagcataatagacataaacaaactaagcgggattaaaagatatagaaagatcctggtcaagtctcgccaaaagtttccaattgcttttgcttctgtacgttggatacctctaattaatgcaaaaagaaccgcgattccaacagccgcagaggcaaagttttgaacagttaaaccaatcgtctgagaaaaattagaaagagccatttccccagaatatgattgccaattagtgttggttacgaaactaacagcagtattaaacgctaatgaccaagaaagccccgaaaaatgttctggattcccaggtaaataattttggaatttcaaaatactaaacaaaactaaaaaactaactaaagaaaacattaaaatacttagtaagtaagttttccaactcatctcgcgattagacacacgaaaaaatttatatattttgttttcaattggtcggataattctgctcataaaattgttctgatcattaataatatggctgatatacttgcctaatggaatggctaataataatggaacaatgatatatggtaaatattgagcccatgttggcatactatgattctcctttcactagaacataaattagataagctaataaaaagattgttaagatcgttcctaagaccaaaaccatttgtctcacttccaattaattttttaatttaatcaagggtgctccatcacgttaatgcgttgtttccaaaattttctaacactaataggaactttgtctgagaatccgtagtcaaatttaagatgctgagcagtatcgaaaaaataaaaaattgtaacatctgctatgaaaaggtctcctgaagtactttgaatgtagccccccatcttttttttaatatcattatcaattaaacaaattactttttctcgactatactggtccgaataatctttgtaataatagttatcaatcattttgaacatctccaaaacatatttaaatcaaccaaagatatagtatatgaaaaggtgttaaaatggtgttaatatttaaaatctcatgttaacattttgttaaattttccatcttaaggcgtgcaatttcgagttctaatttgtctttgtcatccatgaaactcaccttccgtcctaatttattaccgccattataacagaatttttcaaaaatctcccacctatccactccaacaaaaaaagcccctctaatcttgtggattagaggggctttaacgtgctcttggttgcaacaacttccgcttaatctaaaataggcagtcatcccaaatttcgggataactacctatttggtattaatgctcaaaagttgatcagcttgaacgcacttctatttttaacgtgcttttcaaaccatacttctgcggctagctacgtcccgcaaacgatcgactccgtcgcccattcacgaaactaggctagtcctcaaagtataaccggcttgaacgcacttctatttttaacgtgcttttcaaaccatacttctgcggctagctacgtcccgcaaacgatcgactccgtcgctcattcacgaaactaggctagtcctcaaagtataaccggcttgaacgcacttctatttttaacgtgctttcaaaagcatcctattccggttagctacacatgcttacagcaatcattcgccctgttaggctaatcctcacaggataaccacttttgacgcacttctattttttgtgtttcttgttcagaatcttgtcgaacaagttgttgtcttgtgggttaagtgagtcaccacttgcgactgcaaatgcttttagcgcatcacgttgtttactgttgagggtctttggtgtcacgatgttaactgtaacgttttgatccccattacctgtcccgtggagcttaggcgcacccttaccacgtagacggaagacggtattcgtttgagtccccgctggcacttttagtttaacaggaccatggactgtgttgacttcaatttcatcccctagagcagcttggacaaagctaattgggacttctgaataaatttgtgcgccatcgcgcttgaattcagcacttggtgccacgcggaagacgatgaataaatcgccataagggccaccgtttgtgccggcttcaccttggccttgaagacgcatttgttgaccatcttcaacacctgctggcactttaaccttaacagtatgccgttcatcttcgtgacctgttccatgacatgtttcacacttgtctttaatttctttaccagtcccgccacagacatcacagacttcttgagccatcatgcggccgaaagctgtttgtcgttcaacttggacttgacctgcaccgtgacatttgtgacacgtttgggcgcttgttcctggtttagcaccagagccatgacacgtgtgacattctgattcacggttataagaaatcttggtttctttgccgaaaatggcttcatcgaacttcaaatccatccgatattgtaaatctgaaccttgacgaggagcgtttggttgttgccgagcaccgccgccaccgaagaatgaactaaagatatcttcgaaaccgccgaagccttcagcaccaccaaagccgccaccgaagccttggcctgcgccgccgccgaaaccaccgttcatgccagcatgaccgtattggtcataagctgcccgtttttgtgggtcacttaatgcttcatacgcttctgtgacttccttgaacttggcttctgcatctggggctttgttaatatctggatggtacttctttgaaagtttacgataggcctttttaatctcatcatctgaggcgtctttacttatccctaagacgtcatagtaatctcttttatcagccattgtgggcctccattcatatacttacgcgttaaatctatcttatcaaggatagcataattgactgattaaaaaaagccaaggccctagaccatactaggttttggctttttttaaaacgcattattatttgtcgtctttaacttcttcgaagtcgccgtcaacagtaccatcgtcagacttaccgtcagttgcattaccttcagcaccagcagcttgttgtgcttcttgcgcttgttgatataacttaactgttaattcttgaacgatttcactcaacgcatcgcgttttgtcttcatgtcttcaaagttgttttcttgttgtgctttgactaattcttctttagcatctttagccttttgtaattcttcgtcagaaactttaccttcaagttctttcaaagtcttatctgtttggaagattaattgatcaacatcgttcttcaaatcaacttcttctttacgtttgttgtcggcttcttcattttcttgagcttctttcatcatccgatcgatttcttcgtctgataaaccagagttactcttgatagtgattttttgttctttgtttgtgccaaggtctttagcagaaacattaacaatcccgttcttatcaatatcgaatttaacttcgatttgtggcacaccacgaggtgcagcaggaatatctgttaattggaaacggcctaaagtcttgttatcagcagccattggacgttcaccttgtaagacatggatgtctacggcaggttggttgtcggcagctgttgagaatgtttgggctttgcttgtaggaattgttgtgttccggtcgattaacttcgtgaagacaccgcccattgtttcaatccctaatgataatggtgtcacatcaagtaaaacaacgtctttaacgtcacctgagataacgccaccttgaacagcagcaccaagagcaacagcttcgtcagggttgattgagtgatcaggttccttgcctgtccagttcttaacagcttcttgaacagcaggaattcgtgttgaaccaccgtttaagatgactttgtcgatgtcgcctgattctagaccagcatctttcaaagcgttcataacaggtgcttttgtccggtcaactaagtctgatgttaacttatcgaattcagcacgtgataaagtcatttccaaatgtaaaggaccgttttcgccggctgagataaatggcaagctgatttgggtgcttgtcacaccagataaatcttttttagctttttcagcagcatcttttagacgttgcatagccatcttgtcttttgacaagtcgataccgttgtctgatttgaagttttcaactaaccagttcatgatggcttcatcaaagtcatccccacctaaatgtgtatcaccgtttgttgataatacttggaagacaccgtcgcctaattcaagaacagaaacgtcgaaagtcccaccaccaaggtcataaactaagactttttcgtctgtttctgtcttgtccaaaccgtaagctaatgctgaagctgttggttcgttgataatccgtttaacatctaagccggcaatcttaccagcatctttagtggcttggcgttgtgaatcattgaagtaagcaggtactgtgataacagcttctgtgacttcttcaccaagataatcttcagcgaatttcttgatgtattgtaagatcattgctgaaacttcttgtggtgtatatgatttgtcgccaacagttactttgtaacctgcttcgccgatgtgacgtttgattgatgcgattgtatcagggttagtgattgcttggcgttttgccacttcaccaacttggatttcgccgtttttaaatgacacaacagatggtgttgtccgtgcgccttctggatttgtgataatttttggttgtccgccttctaatacggcaacagctgagttggttgtccctaagtcaataccgattactttactcataaaaaataccctctttttttagatttttagtttaatttattgtgcaacaacgaccattgctggtcttaagacgcggtccttcaagtagtagcctttttggaagacttgtacaacagtatccgctttttgatcaccatcaacagcgaccgtttgcacggcctgatgaatggtcggatcaaaggcttgtccttgcgcctcaatttccttaacgccatgatcttctaaagcatgtttcatatgatcgtatgtcatttgaacaccctttttaagactctcagcactatcatcagttgcttcagttgccaacgcacgttctagattatccaaaacgggtaagacatcttttgcaagtgattgcccatcatattttaacaagctagcttgttctttttgatgacgggtttgaatgtttttaatttcagcttgtgaccgtaagaaactatcttctaaatcatcatatttcttttggagttcagcaagttgagccgctaaatctggcttagctgcatcttcgtcaggtgcagcatcttcgatcacttcatctgcttctaattcaggttcaaatggcgtttcttctttaggtgtttctgtttctggcatttctgctgctggcttttcttgtttctcagccttttcttgcttggtcaaacaaacacgctccttttaagattgatcatcatcgaaattcgcataataatcaattaatttcttcgctaactcttcacggaataaatcgagtaacccaatcatccgcgaatagggcatgctagtggggcccagtagtgcaatgactccctgtccgtgttcaccaacgtcataattaacagtcattagactataatgtttcaacagatcgttggccatctcggtgcccaggcgaacctgaacttggctattggcgcctccaggggacaaatctagcaacttggctaaatcatctgaacgattaatcatgttatacaacgacttcagctgggtgacatcggagaactctgaaaaattcaacaagttcatctgaccgccaacaaataagcgctcttgactcgcctttttcaaaacatcgtcgaagatgtctaaaaagccggtcggagaagccatgtactgggctaatagcgccggtacatccgtctttaacttctgactaaccacggttaacggtaagccaattaggtgatcattaatgattcgaatggctttttcgagttcatcacccgaaatcgcttgtggaatggtaaatacctgattatcaactgtccctgcactcgtcacgataatcgccatcacttggtgattactcaacggtactagacgaaaaccagttaaccgaatctcagccacttccggtcctaacgcgattgctgtatagctcgttaggttcgataagatattagccgattgtgagacgatttcatcaatcttatgatagtgctgtccaaatgattgttggaccgttgccacatcaaccggattgagggttgctggttgcatgagatggtctagatagtagcgatagccttgcatcgacggtacccgtccagatgacgaatgcgtcttctcaattaaaccgacactttccaaatcagccatatcattacgaattgttgcagaactaacgtgtaccggcaattctgccattaacttcttagaacccactggctgaccactctctgtaaaaagacgaataatttctttcaaaatcattaattgcctttcggtcagcatgtcatcacctctttttagcacttgaatatcatgagtgctaattacaattattaatatagcaagaacgtcaaataaagtcaagaaacgtaccggcttttttacggatttactgaaaatcggtccttagacggagggccttactggaccaaaggacaaaataaaaaacgagccgcttcttagatggaagagactcgctttatgaagtggaatatttataacgtgcttttcaaaccatattcctgtgcctagcgacacaaggcgaatgctcagaatatcccccggtttgaacgcactcaataactatctagcagaaactcttggaagacttcattgcctaagaacttacctgattcagttagtcttaaccaatcgccttcttgtttgaggtagccctttacaatttgggtggcaactgtttcgccgtaaacattttgtaatggataattgaatttatcttgaaaatgactgatggatacgccttgcatcgtccgtaacccgaggaagagttcttcctccatttgttcggtcagtggcagaacatggcgttcaatgactggcaccttattttcttttaagggttctaagtattgttggattgggccgaagttatggtaacgatccttacctaaatagccgtaagcaccggcaccaaagccaaaatacttttcattgcgccagtaagttagattatgcgcagattgaaagcctggcttggcaaaattactgatttcatattgatctaagccagcccgcttgaaactatcaatcgcggcttgatacatatgtgcttcaacatcttgcgatggtaaatgcaacttgccttggcgcatcaagttatagaagattgttttgcgttcgagaatcaatgagtacgtcgaataatgcggtaagtcgagttcaattgccttattcaaactatccatgaaatccgcttcactttgttgtggtaagcggaaaatcaaatcgatactcatattttcgaagccgaccttgcgcgcgttatcgattgcccgataaacatccgcacttcggtgaatccgcccgatctgttttaaaatctgatcattaaacgactgcacgccaatacttaaccggttgacgccgttgtccttcagaacttgcaatttttcagtatcttgtaagtcattaggattggcttcaaacgtaaactcaccaccctcataaggtaagtattgatgaatcccatcggttaaacgttggagttgtgctggtgataaagtagttggtgtccccccaccgacatagatcgtatcaattggttcgtctgggtattctgccatcactaattgaaactcgcgaatcaacatatcgacataatcatcgaccggttgaccttcaatgaaaaccttattgaaatcgcagtagtaacaaatatgctcgcaaaatgggatgtgaatataagcgcctgccattaatgttgtgcctctaatttctcaaaataagttcgggtatcggcttcgtcttggtggagttggtcaatcaaggcttccgcggagtcaaacttcacttcgccgcgtaagtagtgataccaatccactttcacttgttcaccgtaaatatcgccattgaaatctaataagttaatctccaccgttaccgggttattgctgtggaacgtcacattccgaccaattgaagccatgccaatataccattgaccgcgcactaaaaagcggaccgcataaatcccaattcctggtaatcgttctggtcgttgcgattcgatgttagcagttggaaaccctaattctcgcccgcgtgcttcaccatgcactacttcaccggtcgtttggtaaacataaccgagtaattcattagcttccgcaatcttaccagcatctaaatcctctcgtactaatgtcgagccgattttgacaccattatggtcatgttctgcaactgtcacaatggcaaagcgccctttggcatagtctgacaatgtcgtcatattcgcaatctcttttttaccataagtgtaatcaaagccagccaccactgtatccgcatgtaaagcgactaagtattgatcgacaaatgtttgtggggctagttgtgcaaatgcttcattaaagtgcacgatgtagaaaacatcaacgcctaactccgccatcaattcttgcttgcgctcaaccgttgataaataacggaatgactcccgatcggcattgcgataaacaatggcaggatggatatcaaacgtcatcacagctaatagtaaacctttttgaactgcaatttgttttgctttccgaattacagcttgatggcctcgatgtacgccatcaaaaaagccaagcgccaagaccacttggtcagctggcacttgttcttttgaatatggatgaattaattcaatgacacgcatatttttcacctagttttttttaatgagtcccttgattttgtaaatacattttataagggcgataaagatgttgcgctgctttttcaacttgatagagcgccttgatatgcccttgataggtcaacgccacaatctcatcggtttgttctggcaatgtcaagaacacaccgtttaaaagcttggcccattgatcgtcgtctaaagcaatcttcttgtaatcttcaaatacatggtcaattggcaataaaacgtctgccagttcgcccgcttcagctttttgcgccaattgttccaacgtgatacagttaccaatttgaatgccgccactcttaagacgtgtcaaatcggacatcactgcgggtaaaccgagtttacgaccgaaatcaacagctaatgtgcggatataagtcccctttgagcaaccgacaatgaaccggaatgtttggcgcccagattctgcgtcaaattgtggttcaccatccaaatcaaactgcgtaatcgtgattgaacgttgtggccgttcgactggatcaccagtgcgcgcatagtcgtataaacgccgcccattgactttcaccgctgaaaacatggggggaatctgaattgaatcgcccagaaaactagcgagggtctctttgattctctcagttgaaaaaggttctgttaagcgcgcctcttcaacgacttcaccatctaagtcttcagtcgttgttgataagccaagggtgatttcacccgtgtagactttaccagaatgcaccaattgatcaacaaccttcgttgcttgaccgatacagattggtaacaccccatcgacgttgggatccaacgtgccagaatggcccactttcttcatgtgtaaaatgcggcgcactttaaacacacaatcgttactcgtcatgccgcgttctttatataagggtacaatgccgtccataagtaatctcctttaagtattaactaaactattatagcatagagtgtgaagtcgaacgggattagctttatgatgctgctcaatttattatcaaagcacaaaaaaagatgggacaaaagaaactcttgcccatcctcgctcaatgttgttttagtacttcctttttttcttactagaggagtagttagaggtagtgagggtgaggattggacgtttcattttgctagaataagaagtttactgggatcattaaaggcgtatcagctgcctgtagaagttaattttttagaattttcggcacagggattgggagtcaattcaatgtatcctttcttttccttgtatctttttatttggccgctattattaccgataaaacttagattaaaagtatttatattcgctttgttatttaacatttgtgcttctgcaaatatttttggatttatcggggaattcaccaataacttgtggatcaagtcttcaattgcagttttatatttatttaataattatcacctagtactttcatataagagatttgctttaggagaactacttggctatacaatgtttccattggtggcgtggggaattgttaagatatggaaacgtcaaaaagttggaatacttttgcttgcgttaggtgtttcgctaattgctaattcacatattctatccttgttgtttttgattgtagtattaatattggctgaaatagttagattattaatgcagaagtttaattgggaagaagctcggtatatttgtattgcagcggctttgacaatcccgatgtctgcagttactatttataattttttagtgttaagtatgcataatcgatacttagcacctaatatttcggcacctctaaatgaatcttctatctttccgcaaacatatattgtggacttaaagcatacacttcatccattagcgcttacggatttaaatgcaagaacatggaatatagggaccctttttctaatattggcctttattgcaattatttatctaattgtaagaagaaaagataacgacggttattatgcatttgtaggaattatcggactcttactagtgattggtggattcgattttgtgaattgggattttacagaacaccttaaaatatttgagcctattaaagtaattcaatttttgggtagattattaatgttagcggctatattcttagtggtaccggttatgcgtatgatgattaaagtcaaggcgttgtgggcgaaatggctaataagtgttccaataataatctttctaattaatggtatgatgacaatttatagaactcagaatttttatcaggagatagtgccgactaatattttagaaagtgggtataataatcagctgcatactattgattattttccggctttttctggaccaaaaagcggtgtggactatgcggttaaagctgcgtatagtgatattaaaggaccgattatgtttggaaattcagtgccatcctttaatagtgcaacatatcatatgaggatcaaacacgtagttatgaataaatatttagtgacgccagtagcagcctataatagatttaactatcgggtgacaattgatggacagacagtaaaatggattcataaccaaacatacggaacaatcgcaattagttctaacgaattagtaaataaaaaaaaggctaagctttgtgttgttgcaaaaccattgaaaaatgagtggttagtaatgatcattgcgggcatagcaaatatggctgttatgttgaggttgattttggattttaaacggaaataggtacaacactgactagtgtcatgcaataataataagatggatactatgagtttaggaatcatggtattgaggtcaaaaaagttggaggatttcacatggagaaaataactaaaaaaaaggaaatatgggcgattattttaattgttattttattaatagcgctaaatttatcgattaatttaacaggaaatgggatcacacccaatggtggcgatgataaggcgtttgctcaatttgttctaggaaaacactatctacaatttttacatagtcgatatacgggatggtcttctcgactagtaattgaatcggtattatcaacattaacgcacttaccaattctgtggcgattattaaacacattggcaatgtttactgttatctatatcccgtatctattgcttcttaaaggaactgatgatgatgagaatgctagtcgtctattgattagttttgggatgttcttcttattacctttcaatatgttctacgagacagggtggatggcaaccacaaccaattacctatgggttttagctgccggtttattagcgatgctaccttccttagctcaatatttaggaatagacattaaacataaaaaaataatttcagttgttgctttcttagccttaatctatgctgttaatcaagaacaaatggtaattatcctattattgggtaattcattgttattgtacgtaacaagaggaaataaaaaggcactggggagattggcatttcaattcgtagttactgtattgtctttgattatgattgttttagcaccaggaaatagcgttagaaaagtcaaagaaattcattggttaccattatttccaactttgtcaccctttaaaaaaattgagttaggtatttctagtacattaggtcacttctttttttcatttgatgtgcttgcgacaatacttgtgattttactttttgcgttttatataaatcagaaggggagatataaaataccgcgtacagttttctatattccggtactgttcagcgtgattttttggtttaaagatactttgattggaaaaatttatccaggattaaagaaaatggggggtgctgttactatttatgggacagatatctctttggccaatttacaatctatcttgccagatttacttctgattgtagtaagctgcattgttttattggggatattttcttcgggaaactctaaacgaatgtggttagttatggtagctatgttactcggacttatttcgagaatcatgatggggttttcaccaacaatttgggcatcaggagaacgaacattcctatttttatatgaggcacttatttttggttgcttctatttatatgatcaaattgagaaaaagaaagaatatcaaattttaacgcacattttaattggaattggtggcctagctttctgtgttattttatatacagtttaatgagtttgtagacaataacaggttatccgtgagaaactgaagttaaaattggatacagatatataataggcactttcgataaatataaaatttaaatcggaagtgtttttaatttggctaataattgatacccctatgaaactaagctagaatgcattaggattttaaacttaggtatgagtggtggttaggctggaaaagcgacgtgctagtttatacttggcgcacgtagttacctaattttacttttatttatttgtttcaaaaaatggttgcagtttcgtttaaagaggctttccattgtaatctcaagctaataattgaagattttataaagtctagaaatctttaaagaattccttagatttacaggtaacgaatagtggttagacactgtttatgctacaataaaatagattattttaaattactaagaaacggagttaagttaaatggaaaatggtgtgggatttaaatctgtgggtgttgtttttaaaaaatattggtgggtcatttttgtaacaattatcattggtggcgctgttgggatcatgactgccaaatcaacaattagttacgaaacaacagctaaagtatatgttaacaaggggtatgtcgaagacaaaaaaggtaacggtatttttgataacgatgttgagcgtttttggcaatcaattaatagtttaagtaagacacaaagctttaaaaaggctatgactaaagaggttagagattattcaagcgataatttgttaattgatagtagcaacggatctaaagtcatagctgtgaaatatactggcgctacgcaagccaagagtattaaaggtgctaagtatgcgacagagcttttgaaaaaagaagtgatcaagtatgatgacgagaagagtaagttagttgtgattgaccaggcttcaaaagatacaactgcaacaataggctttagtaataagaaaacaaattctattatgggcatcatctatggtgcagtattgggcttcatcctcagtgctattcattttattgttatgcgtagaaagaattaggagggaacgatttggttaatccgttctttatgttcattctggctttttcagcagttattctaagtttcttttttggctggtccagtatttatccaagtttttcgagtgatgttattttcttttttattgtaatgttcttgttagccggcgtactaggatactttatctataaaagtaatgtgatatcttttaagaaaattaagagtacaacaaatgttgtttggttagtggttattgttttaataggcacattagctgaaggagcctacaatcatggttttccattacagtttatgctccaaggtaaggattccggttatacagaatttggaattccgacagttcacgtttttttactcactctgacagcttttttaacaacctacttgtggcatctaatcctctcttcaactgggaagttgagaaatcaatatatactactttgtgttctaagttgtattccgtatgttttagaagttaatcgcggaatgttcatgatggtgatgataaactgttttaccatttttattctagcaatctggaagaaaattaaagttagacatataattggtttagcgattttcggtatggtgggtctgtttttatttggtgttatgggaaatgcacgagtgaacacgtcatatcaaaatggtcgatcagcttttgattcagcgtcaattatgcaaatcggtggtgcaactgaaaaatttaaaagtagtaagattcctaaggagttcttttggggttatatttacgcttcatcacccgtggctaactttcaaaaaaatgtagattatagcaagactactgaaaaaataacagtttcaaaagtaaatagtatgttttttggtgagttactgcccaatttcattggtaagagagcacttgctaattcagattataaagaggtcaaaattcaacaaattacaccagaattgaatgtcgggacagcattaagtagtccttaccgtttattggggtggattggtgttactatgtacgtcattattatctttgcgggtgcatacgtgtatctgtacttcttatataagttgaattcaagatttttcattgtcgggttatccgtcttaaatacaatatttgcattaactatttattcaaatatgattcaagcaactggtttgagcttacaactagcatatccaattatatttgcactaatcgactcatacgcagattattctaataagagttacttgaaaatttaggaggattttgatggagacaattagtttcatcctaccaatctatggtactgaaaattcaattttagaggctgggttggaacgcttaaagttggcgaagacaacttcatttgaattcttactaataagtgatggcgctagagatgatttagtagcaatttgtagacgcttttcagaagaagacaagcgttttaagttgattgaacaagctaatcagggcgtatcggttgccagaaatacggggattaaagctgctaagggaacttggctgctttttgttgatccggatgacttattagcagagaaatttgaagaaatattgttagaaaaagcaagtactaacgcagatgttatcttttttggttttgatcgagtatatcaagacggtaaagttgaaaatagttttcctaaagataagctatttcccgctacaccggtatcaatggatgatttaattcgtgcaacgctttcggatggcgcttattataatggcatttatggatattttcttggaacaccatgggccaaaatgtttcgaaagtcttttttagaagctaatcaattattttacccagcaggaattattaagagagaagatgcgttatttagcattgaggttttcttgaagaaccctagaattaacattgttgattcgatactgtatcactatagaattgatcatgataattcaattagtaatagttaccgacaaggggttaaggaaagtttcattacagtttcgaatgatctgaacgatgatttagtagattggttacaacaatcagataacgcattatttttggattcttatatgttgagactctcgattgaactcttgtttgcagatttttgtaatctaagcaactctaagtcatatcaggaaagaaaaaatgagtttaagacttatctagaaacgcctgttgttagtaagcaaataaaaaatgcgagattagtcaatatgccaatgaaacagaaactattaggattactgattaagcagagaaatttctatttattaaattatttattgtttaaaagaaagcgtggataagaatttgaaagttgcagcagttattgtgacccataatcgtagggataaattagaaaaggcgattgatagtttattagagcagtccgcgccagttgaaaaaatagtggttgttgataatcaatcaactgatgatacgctagattttttgaaagcaaaagcgcgcgataacgcacaaattaaagtcattcattcagaagataatttgggtggcgcaggtggctttaatatggccttggcggcaactcttgagttgcctgaaattgattggattagtatcgctgacgatgatgcagtctatgatcaagattatatgaagaaaatggctgaacttagtgaaaaacatgccgatatcggttgttttacaggaactgttatcgaagatggtgaaattggaaccgaacatcgtgttaaaattgatgatttggaccggctacaattatctaaaattgacttaacgagctatgaaggtaattttccagttgatattgctacttttgtaggagtttttttgagaaaagatgtgctaaagaagattggcttaccggaaaagaatttctttatttggtatgatgacattgaatactcacttcgtattcgcaaggaaacagaaatgatcaataatatccaagctaagatttatcatctaacagataataatagtgtcggagcaagtggtgttaatcgtccaattggctggaaggactactatggttatcgtaatcgttggcaaactatgaagttacattgtgagaaccaacaaattctagctaagcaattacggtatgaacatttcagatatgcaatgggtgcctttttaaagaaaaaaggccaatattctagatttgctgccgtcaaactagttaatacagcctacaaggattttaaaaatgaaaaaatgggtaagaatgatgcattcttaccgttttaaatgaaagatttggtgagacagagtgactaatatttctgtttgcatggcaacttataatggtgtcaaaaccttacccaaacagataaaatcaattatcaagcaattaaccgcgcaagatgaaattgtgattatcgatgattgttcatcggatgatacaatggggttactgagggagttgttggtcaattttaacgggcaaacaattctgaaaagaaacgatcagaatatgggaccaattaaatcgtttgagaaagcactaggacttgcgacaggcaatcttgtttttctttctgaccaagacgatgaatggcatgatgataaagtggaaattattcaagatgcttatgtaaatgggcacgctgatttaattgtccatgatgcaactgttattggaaagaatggagaggttgttgatcagtcatggaatcactacaaccataaccaagttgaccaaagtgtatttagtaatttaattaaaaatggttatactggtgccatgatggctatttcgagacgattattagatgccgcgttgccttttccagaaaaaatcgaaatgcatgatcagtggctgtttcttgttgctaaaaagaatcattttaaaattacggcgacttctgctactttaatggactatgttcgacacggtggtaatgtcactggcatgagtaagagaaacaaaaaagaaatgttgattggtcgcttaagaatgctgaatacttatttaaagatgaaggagtcctcaaaaatagtaaaaaagtataaccaatatattgaaatagatactcggttacaaaacctagcatattcttggcatttattagattaatgctagtttgttatttcatcaagctaattgcatagatctcattaatggctataaactcgccaccaatcatcaatttatcctggtaatagccttctattttcccctcaataaaaggggccacataaccattttgatcttgcaggctgcgttcgactctaacaacctgactcttttccaaagcctgacttaaacagctttcaatctcgttaagcgccatttgttcactatgccggcgatttaatttaatttcgtcttcacgatctaccttattcaaactagccgtatgatcactcaagtaaaatccttgccacttcatcatgcctcggtcttgatattggtttaaaaactgtgttaccaggtttgggtcaaattcttgtttattcataggaattccctccagcgtggccaccaactaagccagcacgttgtacagcggttgcgccaacagatttacttgataacttaatcagtgatgtgaaaccatatttttttcgaatgtcatcaaccgtacgatcaagattgcgattttttaaagttttgtactttgtatcaaacaaattcaattgcacaacattatcgtcaactagaccagcacagctaattgagatgttccgaacggcttcgccttgccacttatcacgaaaaagcgttatagcataagctgctagaagtccgttatcattggtggcattaattttcatagagtggccaaaaccacgtttcctggtttcctcctttgctctgaaagaataaccgattcctaagctaataactgtagccgctttatgatgtgaccgaattcttgtagccacctgttcggcgatttcacgtaagacaatctctatttcttcttgcttggtataatcgcgtggtagcacctgactgtttccatacgatttagccttaggtacgtacttatcacgaattaacgcccgatcgataccccaactaaacgcatataattgcccgccaataaccccaaatttctgttttaaaagaaacgggttatagtgggccaagtcatacattgaattgatacctaacttatttaatttctcggctgtcttatggccaattgaccaaagatcatcaagttgtgtcactggccacagtttgtcctgaacgtcttcatagtgccattcaccaattagactgtgggtacgtttagcttccatatcaagcgcaaacttagctagtagcggattatcaccgataccaactgttaaatagatgcccagctctttcttaacctttagctggatctttcgagccacctctcgtgggctgtctccaaaaagtttccagctattcgtcatatcaattaaagactcatcaatcgaatagggttgaatatcctcttctgccgcaaaactcttaaaaatctcatgaatggccagattatacttgatataaaggttcatacgtggtggcacaacaatgatcctattatctttaggtacgtccctggtgcgcatgacattactaattccaaagagtttcttggccattggtgaagcagccagtactaagccaccatttgtgttttcagccgtagacatgacgacaagtattgaccttaaaggattcagaccaagttcgactgactcacaactcgcgtaaaacgactttgaatcgatcataaacacgacgcggcgcgactctttagcataatcgtacattgggcataccttctcttaaagcgttagcctgataatctaaagacttctggacgtggccaaattcaatcatggtcatgttaggaatatgcttcaaacagattttaacaagttgatcgcgatcataaaaatagttgcaactatctattaagattgtcgactcatttgctagttcgtgtcgcagctgtaaactaccgtcataatgcagtacaaaatatttgtctgagttttctaaccaaattggtccttcgaaaatcattgctgtagcccccttcaaatgacattatacaaacatacgttcgctgggtcaactgaattattacttattaattagtttagaatgtacaattctgttgtttttatctctgttgcgtattacaattagaggttcatattttctaaaaaaattgaggttgtcttaatgttaaacaaactgcaaaaactttacacgtcaagcctggcacgtatcgatccaaaattatctaatatcattggtaaaatgaagctgttatggatgaaacaaataaattatattatacgtattctccgcttttttaaaagaatagcattatctgctggttctctcacagtaaccacaatatttttgttactgttttacatcatagttcagctgtgggggtttaccaacgagaagtatagttcttggcttgatggtttatgggatatgaaagctacttttatcacaacaattgggattggacttgtcagtctcagtgtaaacgaacaaaataattggcgagcaaaactaaaggttcaatatggttttagaatggcgtttacatcggtagaacaagtaatgtccgatataaatagaacttttttggttgatcaacaaattatcaacgatttaaataaggaatatgcgagaatacaaaataaagaagctgttcaaaagaatattgacaagtcagaacttgatttaaagcttaaaatattactcgaaatctcagaacacttattagaaaagataaatttcacggaattagcagttgatcagaaaaatattcaattggagctttcctacttaaatagcgagattagagaatttatttctaaaccaaccgcaactgatacaaattatttatatatgtttaataaactaaatttcagtatccatacaattgcaaatagattaagttctccttggcgatgggacaaagatagaaagcaaaagtattgcaaaataattgaaaagtataagataaataaggagtaattgtatacaaataaaatataaaaaccaaacttaattcttagtttggttttttaagtatcaaaaactgaacagtacatgacacctactttattaatatttttttactcaaaaagattagaacctaattcaactagtttatttctccatctcttgatttaacgaaattgggactgagtagctatattattgtatatctattgatcacctttttagaggttagtcttcgaatatttaacatgatttacgaccgtttggcaattcttatggtaaccactcaaattatagacatttgtaaaccacaaattaagaagtaaattctgagcggcatttccggttacacctttattacagtaagtcacagtcaaaatatttctatcaagttcgttgacgcgtttacgaatatcacctaatggcgtatttatagctgaatttatatgttgttgatcatattattttttgcacaaacgtcaataacttgtatttttttaccatcctgaagtaactgatatagcttagatatagtgaaatatatattcatctacctctgcgatctcaaaaaatggtctttaaggatattaacagaatcattacattagaagcttttaatatttctaaagtaattctttttaaaattaagcagcaaattgaattggagtcgctacaagaaaaatagatatacaaaaagcgagtttaacgccgattatcggtattaaacccgctttaactttgatgtactaggcagtagttagttacaagcggagcctcagttacccttaaaatgacaagttgaagatggccgccttgttaagaaacaataacgagcaatgtgtaaacggtacctttccctttttgaacctttaaattgcactttatatacatctacttttttaaggcttatgctaaagttgatatttaattaaaattaatcttgattaattaaaaataaatggtatattgattaaaaagagctgagaaagcatgaatagtattttaaatttacaagcgttaccctcaaaaggggaagtttctccagctaagcaggatacatcaagtggtagtagtagcagtagtagtatcgtaaataacagtacttttagtattttttgtaaaaactaacagaattatagaactaggtatatcctaataaatcggatacctagttttttaatatcaataagttctaaaagttaattcaaaggttgattcctccactataacgtaattttagtagttaactggtcaactaattattaaacaaaaagtttataaagttatatttgatgcacttaaaattgttaaataagaaatctgtcaagagttacgccgtattaatctacacaattctaaatcagctcagctttatactgaaaaaaatattttcgtaggcaatattcaatttcaatagtccagttaaacacattgctcctatcttgttttattaattatggcacaactgttcagaaatttatgtaccaaatactaggataggagcaatacttgatagtgatcttagactttttagcaaaaataattagtttatatttagttaagccttttctaaaatcatttaaaaattgagaattggtaggtgtttatatgaagaaatttttttcactgtacaagcctttattaattgatacacttagtaacaagttcgtttttatttttaatatagtgcttccaataggaatgtttataatttctaatagttatcttttacttagaacaactaatttaagtaagactcaaattatttcaggggtgagttattatttttcttatatagtatttataagtgttttaaatttaatgatactaccgcttattgtttatagagagtcggggtactataaatttttatattttttaacaaaatctaaatggacactaattataagcaatttatttgttcaattcactttcataatactcgaactacttatctttaatattgtggtaatgattattacgcatactttgttatggtcgctgttgctagaaacagagttagccgcattgttattaacggttcccgttgtattaggatcctgtgtattactgaattttagaatcagaattgagagtgcaagtattgttatatcattttttatttttctttctttttctatagcaacattatcgagtaagaattttattttcgacagccttttattgttaaaccctattaagtatttgtctattggatttaacactattagtcaacttcctagtgggatttcaatcaatacactactagaattactatttgtaactataatatatttagtcattggcattacatctgtagcaaaatataatatacgaccattaatagatcgggggtagagaaattacaatggaaattaacaatcttgatttttcataccagcaagaaccaatatttaaagatttaagtgttaacttttctgacaaaactattaatgctattatcggtgttaatggtgcagggaagtctacattattagatataattgctgggctctatacaaaaactacaaataattatttatctcattttcctgattcttgtaatattatgtatcaattgcaacatactactttcttcccaactctaactgtagaacagacactagacttatttagaaagattgataaacaagatgaccctgtaaataatcggataatgaaggaagtatatgaaaaagtaataggtccgttaatgcacataaaaatgggtatgttatcaggcggggaaagacagatggttataacgtacggtatttgtctacttaatagggaattatacctattcgatgaaccgctgagtggtgttgatgtacgaaattctgagttaataatgaaattaattacatcactcaatacagatagaaataaaaaggtgatactgacactacatcaattggaatatttaaaagatacgacagtaaatattgtatttatagatcaacaaaggtgtatatttgaaggttcatttaaagaaatattaaataatagtcaaactactgatatcgatgcagcttttaaacgactcacaaagtagagtgtaaaattcatccacttcgttgctcacaaaaaattagtcccctctgcttcagccatatttggttaattagtaatgtaaaagaatagataacactaggcaatagtgttatccattcttttacttctttataaagggttcacgttaatactattgcgccatttacaaattttagaaccaaaattcggaaatggaagaagttagccctttaatcacaccagactagttaatcatggaaaaattcatttaatcactacgctagtctcaaaaactgtacagtttttgagacttatttaaaagtgtgctatactgggatttgtagagtctcatattcttagtctcagaaaagagtgatatttttggttaaaatttatggttatgcccgggtttcaacttcaagtcaaaatttagaagaacaagttgctcaacttgtcgacgctggtgttaatcctcaaaatatttattctgaaaaatttacaggcacaacaactcaccgacctatttttgatctactattaaatacaatctcgaatggtgatactttggttattacaaagcttgatcgctttgccagaaacacacgcgaagccttaaatagtattgaaccactgctagaacaaaatattagtattaaagttctcaatctagggactattgaaaatacaccaatgggtaaaatgattgttcgaacccttctatcagtcgctgaaatggaacgcgatatgattgtagaacgtactcaagcaggaaaagagtattcaaaaaaacacaatctaaactatagagagggccgtccaagacgtaggattggcccccatgaacaagctatctatgagtattataaaaaccattcaatcaaagaaacaattgcagcctttaatacctcaaaagctactctttttagaataattcaccaaatccaaatagaaaatctctctacatcagaaaggtagttacagaatcaacatgaagctatttagaaaaaaatataagccctttcccacccctgaaaacacacccggctatactaataaaaaagtattcgacaatttcataactgaagcttccaaaattttgcaagataccaggcgcagccaaaccgttgataaaacatctatattcgttttactaaaacatttaactgatttagtcacattagagacttcattcactgcttatgatcacagtagtaccgaattttcagactatcttcttcagatttttgaggttaggaacgaacacaatgctaaaaaattatttgaagaaatataccttaatttagagttaaggtagattgcaaatttaatccgaatttttggacaaatttgtcagcataacctgatacggtgtttgccatgcttccacggatgacatatcaataatcttttttctactagatcgcattttaaattccccaattatatttttaatattattttatttagtatgaaatgtttttcacttaaaaaatgacctcactctatgttaaagcctacaatttcctaatctatattttttattttaccaaaactacattgtgtagtatcttttaaatagttcataattacaatgaattttatagttacttactctttaacatatctctcaatcctcataaccaagaatgttgatttttaagcagtcctttagaatccggacatacttttagatcattcatattcgtttaattaactattgaaccactagaaggcacctctctactcattttacacttttcatccccaaaaaagatccatataagtaataacataatcctcaaaaaccacaaaaataacggccccatttagggaccgttatttttttacttttaaatcagcggattttcatccaccgccggcaagtatctgccagccaatccggcaattaccgttagcaagccaacgctaatcaggccggccaagtgaatcaactgactggttgtgtcagacattgcgacgctgccactgatttgggcaatcacggccgttatgtcttgttgccgcattacggctaggcccatcaagccggtgatcaagataaattgcattaggatactaccgagatacgtattccgatatttaataattaaggtttgggccggcgtcgtgacgccggtgtaataagcgcgatgatttaaaagaatgctgttggcactgccaaagaaactaatcaataagatgcctaataaaattagatgtggcgtaatcatcaaccacgcaccagcaacaaatcctagtaattggacttttaagtctgataacttcgaaaagcgcccttgcacgctctttctaataacttgggctaaaatcatccctgcaccgtaagtcacgtaggcgcctatcatcaaactctgattttgaattgcgacaaaaatatagagcattaagaatgtttcaaacgccccgttaattaaagccgcaaccaaaagccaacccggcatcttcgttttagtgccgcgcgtgatgatcacccgcaagattagcgcgactaacccaatgacagcgactgtgattaataaccagacaaatttagcttcaaaaaggcgcagatatcttagcgcaaacgccatcgcggttgcccagacaaatagttccaagttattaagcgatttggtttgttcgacgaacaccgattcatcaagttgcttcacaaacggttcgaagcgttgcataccgataaagccaatcaatacaaatagcatgataacaataaagactaaccgatatgaaaaatgactagcgatggtcaacagaccaaccgttattaggctaaaagccaataacgttttaatttcagtgcccataaggtgccatttccaaaccacccgctcgtgataataaacgctctcataggttggcatgatcacactggcactggcgcccaggataaaggccgccatgtccgttaaatacagccaaggcgaaatagccaatagcaataaggcgccagcagctagcagcatactgatactagttattttaaatgaattctgcacgtggcctagactattcacgaataataagccagttttcaacgcggtatagaataagatatacggcatataagacgccactgactgcccgctatgaatcatggttaagccaattaaagggagaatttgaattaacttcgccaccgcaaagacaatcccttgtttaattttttcactggtcgctaattgttgcccatttgtcatcaatcatccctactttcattgattagatggtaccttatattgcgtctgatttcaaagaagtaccgttaaaagcctaaattgattgcacaaaaaaaacaccgtaagtcgtcgaaacgacttgcggtgttttgattaggattttattcccattccactgttgaaggtggcttgctcgtaatatcgtacacgatgcggttgacgtgatcgacttcattaacgattcgcacagaaaccttttgcaagatatcccatggaatccgtgagaagtcggctgtcatgccgtcgattgagttaacggcacgaatcccaactgtgtagtcgtatgtccggccatcacccatgacacccacactacggatgcctggtaagactgtgaagtattgccatacagttttatctaagccagcgagtgcaaattcttcacggagaattaaatcactatcacggacaatctttaatttgtcttcagtgacttcgccaaggacccgaatcccaaggccaggacctgggaatggttggcgccatacgagttcatatggcatgcctaatttttcgccaaggtcacgaacttcatctttaaataatgtatttaaaggttcaattaagctaaattgcatgtcttctggtaaaccaccaacgttatgatgtgatttgatggttgtcgcagtacttgtaccactttcaataatgtcagtgtataaagtcccttgcgctaagaagtcaatcccgtttaacttagttgcttcttcgtcgaacacttggataaattcgttaccaataatcttccgtttcttttctggatcagaaacgccagcgagtttactcatgaaacggtctttagcgtcaacttggatgatgttcaaaccaaatttaccgccaagactttccatcacttgttcaacttcgcctttacggagtaagccgtggtcaacaaagatgctgaccaattggtcgccgattgcgcggtgtaataacacaccaacgacagatgaatcaacgccacctgaaagaccaagaaggactttcttgtcaccgacttgttcacgaatcttagcgatttgcatgtcgatgaagtcgttcattgtccagttgtcttgggcaccacagacaccaaatgcaaagttcttcaaaatatcgttcccgaattcagtattccgcacttcggtatggaattgaatcccataaatccgacgttcacggttttcgatggcggtgaaaggtgtattatcactttcagcaaccgttacgaaaccttctggaatcgctgtgactttgtcgccatgactcatccacaccgtttgtttttcaggaaggcctttgaataagtcactgtctttgtcagtgactgtaatttcagccttaccatattcacgttctgttgatgcttcaacattcccgccgtttttaaaactgatcaactgcatcccgtaacaaatcccgagaattggaatccctagttcaaaaatttcggggtcaactgaaaaggcaccatcatcgtaaacactcattgggccaccagagaaaataattcccttaggggcgatcttcttgatttctgctgctgttgtcgtgttgggcaacaattcagagaaaatcccgaattcacggatacgacgtgtaatcaattgattatactgactaccgtaatctaatacgataatcttatcgaaatcttgcatgtccttttggaccaaacaactcactcctctttttaaaaagcaatttggtgtgaacaagtaacaccaaattgctagattcataacactaagtcaaactataatgtatctattttactgattaataatgaaaacgtcaatggattgacggccttcctgtgaaaaaactcattctattattaatatttacgtaggaataccttatcaatcacgtgatgtttcgttttatgcaaaatgacatcggcacgattacgcgttggtaagatatattcgtttaaattttgtaaattaatgtcacgccatacccgccgcgccatcttgaatgcactttgtcggtcactgatggcgtatggataatagtagttggtcggatcatctttggctaaatcgagtaatagatcgaaacgttcaaggaaccacttcttgattaagtcggcttgcgcatcgacataaattgaaaagtcgaagaagtcactgacgtaaatctgctcagttgatggcaactgtagtacgttaattccttcaacaattaaaatatctggatcgtcaatcacgtcgaactcgtcgggcacaatgtcgtaaatctgatgtgaatatttcggtgctttgactggtccaacattatttttgaccgcattcataaattgaattagatgcggcatatcataactttcgggaaagccttttttatcaagaattcctttttgtttcagcgtggctgtcggatataagaacccatcagtcgtaatcatttgaaccttcttatccgggtaggcccggctgagaaggagttgcaacaagcgcgccgtcgtactcttgccgaccgcgacgctcccagcgatgccaatgataaatggtgtcctatgtggcttaatctctagaaattcagatttttcggcctggcgcatctggtactgttcatagtgcatctgtatcagatgccgtaatggcaaataaatatcactcacatccgcaagtgaaatccgatcattcaatccccgaatctgttccagctccgtgtccgtgatgccagtatacgcgtcaccgcggccatgaaaaacccgccactcatcacgcgagatttcataatatttcatctcgttcttcatccgacaatcctccaatactaaacgcatccattttaacattaaaaacagagtgcgtcatcttgcgattatatttcgaggattagtctagtaccgtgaataagcgctatttagtagctcgccttttttctttatgaatgattatgatcagcatcccaaagttaagcaaactaatcaccgtccctattctctgaatcgtagttgttcgataataaacggtgattctaccagttcccttcaacgcaacttgtgttaacccagttcgtttattcatctgcattggtaatcgctgatgatggttgagttcggcaacgtaccctttgtaataaataaaggggacttcaacaactgctttttgatccgtcagtgtcctgaaatcaaactgataacggccccatgtatgccgtacatttgtaatttttattttatgcggctgatacttaacgacctgtcttttatgtcgcaaaattttctggtagtcggtttgagcaggtaaatactcatgtccggccccaatgtaataagggttgggcgtgttataggcagcattcgttctaaagcgccaactttggctttgaatactattcgtagagtagatgacatttcctgcgcccaacaacagaattagcagataaaagtagtacttattctttaataaatgacattcatccttagcaactaaataactcacaattgccgtaataatggcaaaaaaacgccacgggaactgaatcgtattgataattgtatgatccaacaaatgccaaggcataatcggcgtcgcagctatgaatagccccaacgcaatcccaattaaatcacggtcgtttttggaatagtaaaatagaccacacgcgatgcctaatccgagtagaatcgtgataccgacattcacagtattcgcatgaaaaacagcattcgttaatgaattaacaacaatgtctttaaagggtaatgtgcggtcagataaaaatgctaggggttgtgcggttacttgaaaagtcgtggttgccatttgttttccaaccgctaagaaataacgccctaataaaccgattgctaataagccagcagcaatgagatactttaaacttttattttggtagaatcccttgagatttaataaggtataaataatgatgacaatgcccatcatttcaacagaaatcatatgactataaccaatagttgccatccctattgataacagataccaataccggtgctcacctttttttaaccgcgttagcatcacaatcattaatgggaaaaaggtgagcgcgatcacttcaccaatggcttgccgattaactaaatctgcaaaacgataaatactaagaccgtacatcaaagagaatattaatgcttgcttcttattaaaatccgctaactttcctgaaatatatgtgattaaaaacgtactaaaattaatcgcaattgcaaatacaataaaactttctttgattgatagtcctactactctcagaatagctggtaagtagagaaaagcatctgggtaaaaaagacctgccgcatagcccattccgccgatgaaaaagtaactaattctcggaaaccactctccctgtttaatcgaaagtgccaaattctcaatgcggttcatgtggaaatgatagtcagaaccagacaggattttattgggctgtaaatagacgattgcaaccatcgcaatacttaatagtccaaaaaataatagggttactgttaaggcatgtcgcctgtaaaaatactttaatctttgcatcatacactcctcataaaaatactttagtatcgataattgccatcccagcatcagtctaagggggacgatcgaattataagtaagtataaataatgtaataatggacattatttatatataaactttaacgaatagaatcggtcaatgtacaatattttgtttggcaattaataagtaatccataagctaagaaagcgataagacgcaaaaaagcgggctaaataattattagcccgctttaaaatccattaaatttataaataaggtagattgcaaatttaatccgaatttttggacgaatttgtcagcataacctgatacggtgaataagcattggggggttgctaaaaatgacattaactatgtgtcaccgaagcaacttattgatcaaatttgtaattccagaaaagtcggtgctaatttattaattaataccgggcttgaatttgacggtgccattccagcattttcacagtcgttattgaagattgtcggacaatggatgtcagtttatggagaagcaatttatgcgacaaatcattatgaaaatcagacctacttggcaagtggcgagacaaccgattttatcaaaggaaactatctgtttgtctatggtttaggtaatataggtaatagtaatgttgtgctgggtggcgaaaaggcgcggaagatagtgtttaatcaatatccgcaacgcgtaactagcatcacttggttagataatcaagcgttgtttgagtttgagcaggctttagacgggacgctaacaatttatgccaatgcttttcaatatgggacacatttaattgatcgcgtagccactataactgtcgaagactagtgacgaggtagaagatgaaaacaaaagatgtaacgattaggtatcaaaaaacagcgacggttcatagtgatcgcaatcaactggcttggcttggaaagatagcagttgggacatgtttcttgatgtacgtatcatatatccaacaaattatggctaatttagctgggcaccctgtgtcggcgattcaaccaagcgttgcgatggttaatgcgactttgtggtttagttacggttggtttaaaccacataaagattggccaatcatcatttcaaatgtcccaggaatcatatttgggctggtaacattaattacaatttattaccattaatagcaaaataacccgggtcaattgacccgggttatttttttgatcaacttacgctaaattaattgacaccctttatgaatggtatggtaccataggcgtaattagaaaagcgaagggattcgggcgcatgcgacgttctaaatggataataatcatcattggtttaggagttttaattggcagtggatggtggcttttagggaatgcaacgacgcaaaaagcgcagcaagtcaagcaaacagaaaatgaacagcccactttttatttgcatggttatggcggttcggctcgttcgactgatagcatgatcaaagctgctcgcgaacaaaagaatgcgacacaggtcctcactgcaaccgttcgtaaggatggttcagttgatttacaggggcgttggttagctaaaacgacacgaccaatcgtgcaagttgttttcgaagataatcgcaatcctaactatcaacaagatggtgagtggtttaaaaacgtcttagtcgcggttaatcggcagcacagcttcaaacgattcaacgtggtggctcattcgatgggcaacttgacggccgtttattatttattgaaccatgcgattgataaacagttaccccgtatggcgaagatggtgaatattgcgggtcattttgatgggattatcgggatggatgatcagcctaatcaaaaccaggttaaaaaggatggccaaccacaaaaaatgaacgcgacttatcggcaactgatgggactgcgtaaccagctccctgctaaatcgattacggtgttgaatatctatggggatttaggcgatgggacgcattctgacggacgtgttagtaatgcatcgtcacagtcgttgcggtatttggtgacgcctggtgcgaagacctatcaagaaaagaagtttactggtaaaaaagcgcagcatagtcaattacacgaaaatcatgcagtcaatcaaactgtcttagcgtttttatggtaaaacatacttaaaaagtggtggcgacaaaaattaattttgtcgccaccacttttttaatgttcaagacggtagtctcgcgctgcttgttcgagattcgaaatgagagcttgttgttttggtgagaagaactgggtcttacgataggctaacgagatataaaagattggttgtggttcatccaataaatcaagtaccactaagtcatcagcaggcgtaatactggtttcagttagaaaaccgatgccgacattttcgtgaatcatactttttaagacactaacgtcattggtgcggtaaataatttcgggtttgatttgattgacgtccgataagttcttgaagaccacgggatgcacgaatccttccgcgagcataataaatttctcgtgggctaaatcacgaaaggcgaccgctggtttctgggctaagggactatcaggtgcaactacaatcttaaaatggtgacgttcgatgactttagctgtgatggtatcggtttgaagtggcgtcgcagagccaagaagcgcgacatctagttcaccggcttctaatgaagccaacaattctttggaacccccatcagctgtcttaaaatgttgaatcgtgccgttagcggctagcttttgtgctaattttgagaagtagtaagtgccgataattggtggcaagccaaaacgcaaatcagtagcgttgagattgagcatgtcggcctttgttagttcaatctccgctaatattcgcgcggcatgttgataaagttgctcaccactaggggtaataatcaatgattggtgtgattgatcgcgctgaatgagtttggtcgcgaattcatcttcaaggcgtttgaccgcgtaagtgatcgtcggttgactgaccttgaattgatcagcgactgccgtaaaattttttaatttaattagcgcagcaaaataggccaaatctttaatcttcataaaaactcctgtttaatgcagtttagacgtttcatataaatctattttatcataaatgtaagttttgactatcaaatgttgaggcgtgtatagtgaccaacatgatataaaagaaaaggagatttttaatatgaaagcacaacaaattttaaatgatccatttttaaataagggtacagcattcactgctgaagaacgtgcacaatttggtttaacggggatgttaccacctcacgtgcaaaccattgatgaacaagttaaacaagcttatgcccaatatcaatcaaaagccaacatgcttgaacaacggattttcttaatgtcaatttttaatgaaaaccgtgtgttgttctttaaattattcagccaacatgttgctgaattcatgccagtggtttacgatccaacgatcgctgacacaatcgaaaactacagtgctttatatgtgaacccccaaaacgctgctttcttatcaatcgacgatcctgattcaatgaagacaaccttggcaaacgctgctgatggtcgcgaaattaaattaatcgttgtgactgatggcgaaggaatcttagggattggcgactggggcacacaaggtgtggatatctcagttggtaaattaatggtttatacggctgctgccgggattgatcctagtcaagtcttaccagttgttttagatgctgggacgaaccgtgaaagcttactcaatgatgagttatacttaggcaaccgtcatgaacgggttcgcggcgatcgttactacgatttcgtcgatcaattcgtgcaaacagctgaagacctattccctaatatgtatcttcactttgaagattttggccggagcaatgctgctaatattttgaacaagtacaaagatcaaatcgtgacgttcaatgatgatatccaaggcacagggattatcacattagctgggattatgggcgctttaaatatctctggtggcaagatgaccgaccaagtttacatgagctttggtgctgggactgcgggtgctgggattacccatcgcatcttcgaagaaatgttacaagaaggtttaactgaagaacaagcacgtagccgtttctacatggttgacaagcaagggctattgtttgatgatgatccagaattaacaccagaacaaaaaccatttgcgcgcaaacggagtgaattcgcgaatgctgatgaattaacaactttagaagctgctgtcaaagcaatccacccaaccattttagtggggacttcaacccaacctgggacctttacagaatcaatcgtgaaggaaatggctgctcacacagaacgcccaattattttcccattgtcaaacccaacgaaattagctgaagcagctgctgcagacttaatcaagtggactgacggcaaagctttagtagcgactgggattcctgctgcacctgttgaatacaacggtgtcacatatgaaatcggtcaagcaaacaacgctttagtctatccagggcttggtttaggcacaatcgcttccactgcgaaagtcttaaatgacgaaatgattagcaaagcagctcactcattgggtggcattgttgatccaacagaacctggcgcagctgtcttgcctcctgtgacaaaactagatatcttctcacaaacggttgcgaacgctgttgctcaaagcgctgttgatcaaggtttgaataaagaaccaattgctgacgtgcaaaaagccgtcgcagacatgaaatgggaaccagaatacaaagtactataatttaaatataaatcggtaggagcgtgaaagagttggcagcatttctaacatcattatcaagcgttgtcgaaatcgtcttagtcattgcattggggttttggctacggagttcaaaaaaattcgatgataattttaaaggcacaatttcatttttaatcatgaatgtcgctttaccattatcaattttcgtctcagtattagataacttaacccgtgaaaagttggtcggtttatctggcggcttgatctacgtcttaattagtttcgccctcggttatctcgtggcatggttactaaccaaggctttccggattcggccaggtcgtcgagggacatttatcaatatgttcgtcaatgctaataccatcttcattgggttaccattgaacttggcactattcggtgacaagagtttaccttacttcttgatctactatgtggccaatacggtttcaacatgggcaatcggggtcttcttcatctcaaatgatgatccaatcaaagaaaaaggcgctgctaaaggcaaatttaactggcgtaaattattaccttcaccattaatcggtttcttagccgcattaatttatcttttaactggtttaccattaccagaacttgttgataagacattctcaatggtcggtggcatcgtaacaccaatgtcattgatctacattgggattatcttagctgatgctggtttgaaatcaatccatttcgaccgcgatacagtccttgcgttattaggccgtttcgttgtggcaccagccatcatgattgccatcatgctattcttcaagaacacaacttcaattccatcaatcgaacaaagcacattgattattcaagctgcaacacctggtttggctgtcttaccaatcttagttggtcaatcacatggtgacgttgaatatgcaacgaacgttgtcacaacaagtaccgtcttattcgtggtcgttgtcccaatcttgatgcaaattgttcaatatatctaaagcttaaatgtgtcgttcagctgacactcccctaaatcttacccccagcgcgccgtctcaattaattgagacggcgctttttttgtgcaaagaaacacaaagaatgttgtcaaaggcggtaaagtgcattacaatgaaaacggatttaataatgtgaaggggacgatagcatgacagagaaaatctacactaacttagcacctgaaccattgggaccatacagccaagcgattgcaacggatcaactggtctttatgtcagggcaactcggattaaaagatggccaattggcaccggacttagcgagtcaaacaaaacaagtaatcacgaatatgcaacacgtgttagcggcagcaggattatccctagaaaacgttgtgaaaaccaattgttttttaactgatttggatgactttaacgaattcaatgaagtatatgcgcgattcttcggtgatatcgcaccggctagaagtgccgttcaagttggtaaactaccagctggcgcaattgttgagatagaagcagttgcaattcgttaatgccgtaattgactgaataaacaaccatttgaaaaaagcctccagaggaaattaaatgcatttcatttaatcatctctgggggcttttttgcatgcctgaaatttaatgtttaaagggatgttcatgggtacaaatactgatatataggcattgttgtgaaaatattctaccaatgttaaaaagtttaacatatagggaaaaatttatcttgtgctacgacttaaaaagaaagaaactactgctacaacaactattgcgcctataattgacggaataatggccataccagctatatttggcccccaactgcctaaaatagcttcaccaatggatgagccaactaagccagcgataatattgctaatccagcccatagctgcgccccgattagtgatggcaccagcaattgcgccaataacagcaccaacaattaaaacccataaccaatgcataaaattcacttcctcttttttgaacaaacgttctataatgattacaaggataactataaccttatcaggggtgtgatgcaaggaaaccatacgagcaaagctgttgaacaaattcacaatatttcctgtgcatgctatttatttcataaatgtttcaataataaaataggtatgtaaaacaattatttgtgtttcatatctccgatcaagtggagtgtccattaaccaatttttgagattgctagtgttgggttgactgggtgtcaacttatattattagctacaccaatatgtattttcggatagatcagttaactcagcattaatcattttttcttaaataaaataaaaaagtgggtaaatgaaaaatgatcatgatgtatacacagtcagggtgtcattcttgtatgacatctcgtcgatggtttaataaacacggaatcagattccaagaaaaaaactttagtaaacaccctccaaaactataagtaaagaaaatagggtccctattttcttttaataccgtatttcacacggtatcgaataaaggtcgtccgtttaatacctgtatttcgggacacatcaatgtcactcatgccagctcgataaagcttaaaagcatgtagtaagcggggatcatcttcggtatattggggtttgcgcccatgatatttcccctgatgtttggccaggaaaatcccctgttgttgacgctcaataatccgcttccgttcactttcggcctgatacttatacagttcaatgattaagttagtcatcagttgacgcaagttaggatccgcaatccccgtcatggacggcaaattcaacacatctagggtggcacctttgttctgaatggtgttcataatcttagttaagtcctggttgtttcggcccaagcggtctaattcagtaaccaggacaatatcgccttcacggatataggccagcattttttgcagttcaggtcgcttggtgttagccccacttaacttatctgaaaatagtttatcaacgccttttaaagccgctaactgtcgatctaaatgttgctccttggaactcacgcgcgcataaccgattttagccatttccgtttctccttttggacagttctaatgaacatttataaatcctagtatatcacagaaacgaaaatgaccactagggtataccctagtggccgtttttgatccattatcaatggctttttaaattagggcctagtacttttggaatggaaataatttccaacaccaaaaattctagacccgatattattaccctaaaaacgagtacccggtaatactgggtactcgtttttttgatcctttggatgatcaagcagggacgcgcggaaactcatttcgtaatggtaagtcagctaaataataggtcataatcagtgaaccaaggtcgggactatgctacgataaatttaggttgaatcagcgaggtgagtggatggagtggcaacaattattaatggaaaatacggcgttgatcaatgcacaggttgttcagattgggctggaacgggaaggccagcgggtaacggtgaccggtcatttggcggatacggcattatcaccaacacttatcagcgagttgtccggcctgcaacgggactttgcggagacacagttggagttagtcacccaaccgcaagcaagtgcggttgctgcgttgcacgccttaacgatgctcacacaacaagtccggcaaaggcttctgcctgaactgatttggccgctaagcatgccgcccacacttccacgagaagaccgggatattccaattgctaagttggatgcggtcgctgtcgcctatcgacaaggacttgctcaccgctatggccgacgacgtcaaatgttgtcaggtgttcactgtaaatgtaagcttagcggctagtctgatgatgggattgtatcaggcccagacagatagtcgtgatttcactacctttcaaaatcgctgttacctgcacattgcgcagaattatttgcactatcgctggctactgacgtatctttatggctgctcaccacgctgctggccacagtctggtcttacgccaccagcccagcccgttcgaagcttacgcaacagttctagcgggtataccaatcggccgggtgttacggtctcgtacgcgtcgttaaatgactattgtcaaacactgcaagcggccgttgataatggaaaattaagtgcgaccaaggaattttacggtcaggttcgattgcgtcatgccggtggtcattcacaactatgtcaggatgggattcaatacttggaattacgtaacttagacctgaacccatgggccggtgcgggcgttgatctgtcccaactgacctgcttaacgtggttcgttttactgatgctctggttaccagtgccagctagtacggataattggattcaggcgggtcagcgcgccaacgaacaagttgccatcgaaacccccatgcaagtgactcgacagctaactgaaggcgaacaactagctgacgcgctacaaactatggctaccagtttacatcaaccacacgcgttgcaagtcgcccaacatatcttaactagtctgcacgacccggccaacacactcgcggcccgctgggaacaacaaacaaacgattcgctcgaacgtgcaacccaacttgcactccagctggctgcgacaccacattttaatgcttgaatatactgaaatcggcgtacacacgtgttggcacgttaggacgcacatcggcggacgaataacaaaccaactaataagcacgtttaaaccatgactaacgtcaaataacgcgtcgcatgtcaagaatgataatttttgagacgattatttgcgcggaaactgaaattgcgttaaatttgagctatactattactaccacaaatattagaaaaccattagttatcgaaggggcgcgcgttttataattaagttagccacgcccaaaaggtcaccatttatcggaaatcgaacgcggtcaaatcgccgcttggcacattgaaggatgctcagcacggcaaatagcgattcgattaggcgtctgccaccagaccgtcaataatgagctcaagcgtggtcgagtcacgcaagttaaacgcgttaataatcagaaacactactttgaaatttacagccctgaagccgctcagaatcgctatgaaataaagcggcaaaactgtggacgtccattaaaatttatccaagtgacggccttcttagcctactttgatgataagttctgccatgagggctggtcgccggacgctgctgttggttatgcccgtaagcaccggttatttaagccggccaaaatggtctgtacgaagactttgtacaactatatcgatgcgcaactattggagatccgtaaccttgatctgctggaaaaaacaaaacgccggacgacccagcaccactcgcaccaacatcagcgcctactcggtcgtagtattgaagaacggccaaagcgagtagaaacgcgccacgagtttggtcattttgagatcgatactgtcattggcaaacgtgctggtagcgagagtgtcctattaacgtttaccgaacgtaaaacgcgctatgagattgtccgcttgatcgagggtaaagacgctgaatctgtggcttatgccatgcaaaatattacggctgaattcggtgacgttatgcggacagttacggcggataacggaacagagttcaccacgctaacggctgcgcttgagggtgttgccgagacttattatgcccacccttatagctcggccgaacgcgccactaatgaggtccacaatcgtatactcagacgttactttcctaaggggcaatcactcgatctagctacacccagtctggcccgtcaagctgaatcttggctcaaccatctcccgcgccgcttacttaagttctgtacaccagctgaaatatttcgaaaggaattatcacgtgcgcgcaaaggccgcgccgcctaatcctgatccacctggaactcccatgagccctttcgtctgtgtgctttatcggcactggctaacttactattgcaatttgcgtaagcctaaaaaataaggaagttggcctgattggtcaacttccttattttttatcagctattgatcggcaacttttttcaataatcgtttcatctccgtgatctcttcacgttgcgttttagcgatcttctgtgcgagggctttgacttccggatcgctgagttgcgcgcgttcactggttagaatcgcggtcgagtgatgggggatcatttcttgcatccaagctgcatcgtgcacggtcgcttggctacgaactagataaagcgagccagcaaatatcaccgcactaccaagtaggatcaggcggttcaaacgtttattctggtacattgaccacatgaataacagcattacaatggccatggtggcgcccataattagcgccatatacagtcgcgtttggcttagaaaaatatgatctaattggaacacattaaggtacattaacccatacataataactgtagagacaagaatcatcagtaaaaatttcgtgtattgtttcatgacgtcctcctcgctttcgctggctttattttgactataggtagattacaaatttaatccgaattatttgcaatttaaaacgtagtctccaatattgtatttagtatgcctcatgggaattcactctgatttatgtggcccccttcaaattggaatttgtaatctaacataaacggcttattaatcacgcctaaccggctcttcaggttgtttttcagggtatattttttctggatttatttggggattttcaggcggagtctttactggaaatctttgtggtaattgctttttaggcttttctattggtatatgaggagtaattttgtttgggtgtttttccaaaagtgatatcattagctatgcctccttaaattcttcttgaatggagtgtcgtcttttaaatcagagcgatgttgataccatttttccgcttgttccgtagcaattgaaatggcccgcttatcgtcataatttttttctttaagcgcatttgcgatctcaatagctttttttcgaaccacttttttcaaatttttcattgatggtgggtaattttgttcattccaaggcatttcaataacctccattatttacaattaagtaaattttttagtcaattaatcgtaaagttaaagtccaagttaatctcttaagtagcaatatcaatattccgacaccacttcttagcataagtttatttgttatatattaaataagattacagcatgttggtaagcgttgtcaaaaaagttgctttagtttcaaccgatagtcactagactcatattttaactaagaaatagtatcataaacctacttttaaatcttatgaaaaatataattggcagtataaattgagcctttaccttgctgctggcattattcccgtggctgataaaatgtctaatgtgggaaagtggctcaaatttaatggttgcgggattacaataagtgatcttgaagatctccacggagaacttttaacgatttcccgttctaaatatgaaacattgcaaaatgaagttaagcttcagcaacatcgggttagagaaggatactatacacagaaattggtttcatccatagaaaagagcttggaaataagtgtttaatgaatactacaactagcgcttttagtttttttttaatttagcaggatacgcagatcggtagaggaaagcatatgcaagcaagagaattgattcaaacatttattgaaaaagtgattatctttcaagacacactttataaagcagaagaccaacagtacttatttaatctcgtcttagaccttgttggtgaagaggacagtaacgttgcggtgactgatcaaagtctcatcggattaaaggacgcattgttgcgtcttgcagttgcgaatagccggattgagaatttagcggcagaacaagatattttaggggcgaagttgatggatttggtgacgccattaccaagtgcggtgaaccgccatttttggcatcaatacgagagtgatccccaacaagcacttgccgacttttatgaattaagtcgggccaacgactacgttaaagtggccgcaatcgcgaaaaatatcgcttatcaagtgccgacgcactatggcgacttagaaatcacgattaatttatcgaagccggaaaaggatccgaaacaaattgcgttagccaaaacgatgaaacaaaccggctaccccaaatgtcaattatgtctggaaaatgaggggtatacggggcgtttagatttcccagcacggcgtaatcatcgcatcattcgttttgaattggcaggtcagacttggggcttccaatattcaccatatgcttattttaatgagcattcgattttccttgatggtcaacacgaaccaatggtgattaatgaaacgaccttcaaaaatttattacagattgtgaagcagttccccggctatttcgctgggagtaacgctgatttaccgattgtcggtggttcgatcttaacccatgaacattatcaaggggggcgtcacgattttccaatggctaaggcgccaatcgagacaccactacattttaacgggtataatgatattcaggcgggaattgtgaagtggccaatgtcagtcattcgtttgacgagtgcgaatgcaacgcatttggaaacactcgctgcacaaattttaactagttggcaaaattacagcgatccaagtgtccaaatcttagcccactcagaagacggcacaccacatcatacgattacgccgattgcgcggatgcgagacggtcaattcgaaattgatttggtactacgcgacaatcaaacgtctgcagaacatccagatggaatttatcatccacatgcagatgtgcaacatattaaaaaagaaaatattggtttaatcgaagtgatgggcttagcaattttgccaccacgactcaaagatgaaatggctgaggttgaacactatctctgcgatcaaccaaaccagatggccgcttaccatcaagaatgggcagatacgattaaagccgctaacacatcgattacatcagataacgtaacggaattagtgcggactgaagtcggcaaagtgttcatgcgcgttctagaagacgctggtgttttcaaatgcaacgaacaaggtcaggcagcatttattaaatttacgcaacatgtttaacctataaggagggacattcatgaagtattggcgagaagcatttggagaaataaatggtcaaacggtttggcagtattggctagagaatcgtcaggggtatcaattagccgtgacagaatacggcgcaacgattactcacttggtgatgccggatcaaagtggtcagatggccaatgttgtgattggctatgacaccctagcggattttgtaaagcaacaagcttattttggtgcgacagtgggacgcgtagctggccgcatcggtcaaggtgcttttacactcgatggtcatgattatcaagcaccgattaataatggcgccaacacgaatcatggtggccccaatagttttgaatcgcaaatctggcaatcatcagtggttgaaaaagatgatgcgattagtgtcgttttcatgttaacgagtccagatggtgaaaatggattccccggtaatttagcggtgaccacgacgtatacgctaaatgaggccaatgaatggctaattgactatcaagcaacgactgataaaaccacgttgtttaacccaacatgccatgtctatctgaatttgacgggggactttgatcaatttgttggccaacacacattgcaaatcgatagtgaccgttttggtgccattcaaccagacggcttaccaaccggggaattagtcccagttgcgggctctgtctttgatttacgtcaaccgcgagctttgcaagccgcttttgatagtgaaaatacgcaaactaaattggtcggtggttttgatcatccattcctgttgaatcaaacgccgggtaaatcggatgcgattttacgcgatcccgaaagtggccgctcgatcacaattgatacagaagggaatgcaatcgttatttataccgccaatggcttcggggacgaaccaaacttaacaaatcaggcaattcaaccccaccaagcagtggcgattgaagcccaaatgatgccagatgccatccatcataccgagtttggtaatattgttttgcatcctggcgaacaatatcaacggcggacccgatataaactcaattaatttattttacgcttgcatgcggttacaaaatcgcgtataattgacttgtttagatgaccgattctggtggctagataataattgtgtatttaaaaggagtaacatcatggaaaaaggaacagtaaaatggtttaacaatgaaaaaggtttcggctttatctcagcagaaggtcaagacgatatctttgtacatttcagtgcaatccaagacgaaggcttcaagtcattagaagaaggccaagcggtcgaattcgacatcgttgaaggcacacgtggaccacaagctgcgaatgttgtaaaactttaatttagaggaattaaatacgactattctaatttaatttaattaaatttaaattagaataaaatcgttcatgtttataaaaaaatagcataaaagtgttgacttcatttatcatgtgaactatgataagcacataagttaataaagcgattgaaaagcgcagtagaattagtaaccactattacagagagtcgggatttggtgagacctgacatatgtttctaagtcgaattacactttttgttttatcaaatcgtacgttgaatttacgttaaaatctagagtgatattttgaaagtgcactttcaaaatataacacgggtggtaccgcgaaaaaatgacatttcgtcccagtaatctttattttattaaagattgctgggacttttttaatttaggaggaaattttgatgagaaaaaatattattgatgaattaacatggcgtgatgcgattaaccaacaaacagatgctgaaggattgcgtgaattagtagaaaacaacaagatttctttatactgtggggctgatccaactggtgatagtttacacatcggtcatttgattccattcatgatgatgaagcgattccaattagctggacatcacccatacatcttaatcggtggtgggacaggatcaattggtgatccaagtggtcgtaattcagaacgccagttacaaacaatggaaaaggttcaaaaaaatgttgaagctttatcaaaccaaatgcggaaattatttggtaaagatgccaatgttacttttgttaataactacgattggttatcaaaaatctcattgttggactttttaagagattacggtaagaatttcaacatcaatacaatgttagctaaagatattgttgctagtcgtttggaagtggggatttcatttactgaattcacataccaaattctacaatcaattgatttcaaacacttacatgatgaacataacatccaactgcaaattggtggggctgatcaatggggcaatattacttcagggattgatatgattcataaacttgaaggtagcgacgaacccgtatacggtttaacaattccattaatgttgaaagctgacggaactaagtttggtaagacagcaggtggtgcaatctggcttgacgctgaaaagacttcaccatacgaattctaccaattctgggtaaatcaagatgatcgtgatgttattaaataccttaaattcttcacattcttagaagaagacgaaattgaagaattggcacaaaaagttgcaacagaacctgaaaaacgtgaagcacaaaaacgtttagcacaagaagtgacacgttttgttcacggtcaagaagcattagatgaagcggaacatattactgaattactttttgaaggtaatatcaaagctttagatgttgttgaagcagaacaagcttttggtaaagcaccatcagttgaaattagtaaagaagctaaaaacattgttgacttcttagtggatacaggtattgaatcttcaaaacgtcaagcacgtgaagatgttcaaaatggtgccattacaattaacggtgaccgtatccaagaaactgatgcgatgattgacccgatgactagctttgatggcaagtttgtgattattcgccgtgggaagaagaattacttcttagcacgtgttactgactagagacgttccaaaaattaaatgaaggcttttgtatctatactgaatgttactgggttcttcgtgaatgtagatcatatagtataaccccaaaatacaactgcaaaggtagctgtcaaacgttgtttgacggctatttttcgtactctaaaaaatcggaatcgctttcatgtgtttgcttttatggacaatgagcgtattctattgattggggttatactatatctacaatttaggaggattttttgttatgagtaacaatagttttagtgcaaaagatacagatttatctgctctatttatcggtgataaagctgaaaatggtcaactttacaaagatttgttaggtaagttagttgacgaacatcttggatggcgtcaaaactacatgccacaagacaaaccaatgatttcagctgaacaacaaacatcacctgaattccaaggaacggttaacaacatgaaagacgttttagacgaactttcagcacgtttacgttcacaatcagttccttgacataatgctggtcgttactggggtcatatgaactcagaaacattaataccagccattttggcatataactatgcaatgttatggaatggtaataacgttgcgtatgaatcatcaccagcaacttcacaaatggaagaagaagttggtttagaatttgcaacattgatgggttacacaaatggttggggccacatcgtagctgacggttcattagctaacttggaaggtttatggtatgcacgtaacatcaagtcacttccatttgcaatgaaggctgttgatcctactattgtagcaggcaagacagactgggaattatcaaacatgtcaactaaagaaatcatggacttagttgaagctaacggcgacaagattgatgaaatcaaagctaaatcagctcgtggtggtaaagatcttgacaagttaggtaaatggttagttccacaaacaaaacattattcatggttaaaagccgctgatattatcggtatcggtttggatcaagtaatcccagtaccagttgattcaaattaccgtatggatatcaatgaattagaaaaaatcgttcgtgaattagcaagcacagaaacaccaattcttggggttgtcggcgttgttggctcaactgaagaaggtgctgttgacggcatcaacgaaattgctgaattacgtaacaaacttgttaaagaaggcatctacttctacttccacgttgatgctgcttacggtggttatggtcgtgctatcttacttgatgaagataacaaattaattccatacaaagacctacaaagcaaatttgctgaatacaatgtcttcactgaagaagaaaaccttgtttcagaacatacttacaatgcatatgggtagattgcaaatttaatccgaattttcgtaaaagcgcgcttgtgaattaatggcggcttgatggccggtgacgagactgtcgacaacggccacatccgtgccgcgttgaattaattgatcaacggtgtgtgagccgatgtagccggcgccacctaatactaaaactgtcatcttatcattctcctcttcagttgactgattaacctaattttttagcgccatcggcaatttctgccacgtagaaacttggcgcatacccaatcttgtctgtataaactttagcaacattcgtttcaaagttgtcgacttggtctttagcaacaattgcaatcgcacaacccccaaagcccgcaccagtcatccgagcgcctaagacccctggttgttgccaagcggtttgaacgagtgtgtctaattcgatcccagtcacttcataatcaaattgcaatgacacgtgtgacgcattaactaatttgccgaaacgttcaaggtcgttgttcttcagggcttcgcgggccttcattgtccgttggttttcagaaaccgcatggcgtgcacgtttcaacaagttttcatcttgtagcatgtatgtttgtaaatcaaaggtttcgttatctaaatcgcccaatgattgaatatcattcttcgtttgtaaaatggctaaggccttttcacattcactgcgacgttcattatattttgaatcggccaattcacggcgtttattagtgttcatgataataatcacgttgtcttgcaaatcaattgggactaaatcgtaatccaatgtgttcgtgtctagtaagatggcatggttggctttgcccattccaacggcaaattgatccatgatgcctgagttaacgccgataaatttattttcaaccatgacaccggttttaacaaggtcgacacggttaatttctaaattgaattggtcttctagaatcacacccattaataattcaattgatgcggatgatgataagccagcgccgtttggaatattgccttttaaataaatgtccaaaccactgtcgattgtgtaaccttgttcttgaaggtaaacaatcatcccttttggatagttcgcccagttgtgggccttttgataagataagtcgctgaggtcaaatgaaatgacacccgcatcttcaaagttcccagataataaattgattgtttggtcatcacgtttagcaacgactgcatatgtgcccaatgtaatcgcggttgggaaaacatgcccgccgttgtaatcagtatgttcaccaatcaagttaatccgacctggtgcgaagtagctcgcttccggtgctttgtggaatgcgttttcgaatgcggtatttaattctgtcatgttcatagtaaattcctcctttattaatcgctttcattttactaaacatttactaaaaaatcaatcttttttgttaactatcgctttcttttcattggttatgctaaactaagtaatagtaaacattgaattgagaggtgcaccttggcaacgatcaaagatattgctcaactcgctaacgtttcgaatgcaaccgtttcgcgggtcctaaattatgatcaaacactttcggttggcgatgagacccggcaacggattttcgaagccgccgaaagtttaaactatcgtaaaaacacgcgcaaaatgaaccagcaacgcggacgcattgcgattgttgaatggtataccgctaaagaagaattggaagatctatactacctctccatccgacttggcgttgaaaagaaactcaaagaacttggttatgacgtaacacgcttctttcaaaacgatccatttgatacgctccatgatgctacgggtgctgtggtaattggtaagtacagccctgcgcagattaagcgcctaaaaaaactcaaccacaacctcgtcttcgtcgacatgaacacgctcgattgtgaagtcagctgtgtgatgaccgacttcaaaacaccaattaaatccgtaatcaatcattttacaaccgccggcttaactaaaattggtatgttaactggtcaagagagcactgctgataatactaaattgggaccggatccccgttttattcattttaagacgttactcaaagctcaaaaaaactatcaccccgattggattttaaccggtgactttacacccgaatcaggttaccaactcatgatacaattattacaagaccaaagttccgatttaccagaagccctcttcatcgccaatgatgcaatggcagtcggcgctttacgcgccttacatgaatcaggcatcaaagtccctgaacaactcagcctgattagtttcaacgatacctcaatttgccaatacacgttccctactttaagttccgttaaagtttacactgaacaaatgggccaatcagctgccgagttattggttaaacaactcgccgctagcgaaattatcccccaagtcattacgattggcacgacgctgacactacgcaatagttcaaaataataccttcagcccaccgatgatcaattcatctcgtgggtttttatcttgtctcaaatcaattttcattaataggagtatctcttttgaaaacgaaaaaaattagacgaaccatcttaaccattgctatcttggcagtcggttatctcggtggtcgcaacaatgtcttacaaaatgtgttccctgctacagttgctactgagcaaccagctaaacaaacacccccagtcagtcctgattatcaagccattgctgatcaagattttaaaagcggatctgcggcctatctaccaattaataacgatcaaagccaattaacagcaacggattggcaaggtgaaaaaatcgtctatgggcaactcgaccagcttaaccgaacaactagcgtcacagcttacttatcaaagcggaatctgggcaaatcagaaggccggacgcgccaaatttggaatccaacgggttggcataatcaacctctgattgtcaatgaccgccgaatcacaccgcaaaatcgtggccacttgattgcttatacactcacttttaattttgatcagaatggtaactttcaagctggtcaaccaggcagtttagataatccacttaacctcgccacccaaagcgcgtacagtaatcagaaaacgatgcagatttttgaagaaaaagtccgcactgcgctcgaagcaaacaaaaaagtgatttacaaagtcaccaccgtttttcggggtaatgaactgatgccgcgcggttactgggttcaagccatttcaacagatggcacgctgaatttcaacgattacgtctggaatgttgaacctggcgtcgcattcgattacatgactggtcgttctcacttagatgctagcatgcaagtcaaagacggtcagaatattgttgaccgcaccaaacaacaagtcaaacaacttttctaaacaaaaaaaaagaggtagcaaccagaataattctagttgctacctcttttgctagcttatttttccattgccttacgcaatgcagcggctaatggactttccgctggttcatcttcttggttcactttttgaatcaagcggcgttcttcatgtttagagattttcttcttacgatctttcttgtcgagcatcttttcggtcgtcccatcattaagacaccggaagtatgcgccgccttgcccttcaataatcaccattttcttgtgacattgtgggcagcggtggttggaaaccttcggatctttccgacgccgatagtgacagtttgtgcagacataaattttaccgtcacgcgtattgcgttcttttaacggatgatcacattccggacattttttattcgtcactgcaaaatcgcggtattccgtctcactctttttaatctcaccgaccaaggtcttagtggcaccctcgatttcagtgatgaacgccttcggattttcttcgcctttggcaatcgcttcaagcgactgttcccattttcctgtcagttctggtgaaaccaaggtctgattaaccaattttaaaagttgctgaccttttggcgtcactgctaaagcatgaccttgtcgttctaggagttcactacggactaatttttcgatgatttcagcacgagtggctggcgtccccaaaccgtagtgttccatcttcccgagcaacgttccttcagttaatggcttagggggcgtcgtcaattgttctttaaccgcaaaattagcccgaactaccatcccttctcgccagtcgaccgtcgcggttggttgcccctctttatcggcagcatgccaaccttgttgcacgacttttgtttgcttaaacgtaaaggtttgatcaccaaacttaacggtggctttcgtaacagctgtcacgtatggatcagcaaacaaccctaagaagcgttccacaatcaagcgatacatgcgcagttcatccgtcgataatttttcggcacgaacgggttcttcagttggaattaaagcgtagtgatccgttactttgccatcattaaagacggctttttgtttgacctgactgccttgccccaagtattgcttagcacgtggatcaaatttgactaatgccgacaaccgttccttcaaagtcccttcgatatctgttgagagatatttcgaatccgtccgtggataactgacaactttatggatttcatacaatgattgaatcaaggataacgtctttttcgcggataaaccatactttgcgttggccacttgttggagttccgttaaatcatatggtaaaggtgctgattgcgatttctgcgttgttttgacgctgaccacttggcctttggcttgttgcaattgtgcaactaagtcgtctgccgcttggcgcgtcttaatactttgcggatttgctaattgtaaggcggcttgctgttgatcgaccgtcaagtgaattgtgtagtaggtttgcggtttaaaacgattaatttgttgtgccgtttcgttcacaaaggctaacgttggtgtctgcacccgaccagcggataaattatcttcatacttggtcgtcaatgcccgtgtcacgttcaagccaatcaaccaatccgctttgccgcgtgctaacgctgatgcgtacaaattatcgaattgcttggctggttttaagtttgcaaaccctgctttaatggccttagtcgtttgcgatgaaatccagagccgttcaaccggcttatcgaatttaatccattccaaaatatagcgcgcaacggcttccccttcacgccccgaatcagttgcaatcaccgcacctgaaatatctttgcggttggcgaggtgactgatagcttttaattgtccacccgttttaggcaatggctttaaaccgatatgcttgggaataatcggtaagtcttccaaacgccattgttgccattcttttttgatatcctctggtaattgcagcgataacaaatgcccaaacgcccaagtgatgacgtattgatcgccctcaaaataggttttagttttctgagttgttcctagaactttagcaagctctttggcaacacttggtttttccgtgataactagttttttttgcatttaaaattcctcttacttcaattgatcaaaatagtaactgactaatagtataacgcatgttgagaaggaacaacccagaaatcgcgaaagtatcataaataataatatttcaacagccaaaataaaagattctaagaaactgaattcttagaatattcttttttatcaacggttatacagaccgcggttaatgatgaaggaacacgccagaaattctctggcgtgtttttttgtggcctaatttggacatgcgtcattgtttttgttataatgaaaccaccattgaggaggcactaacttatgcaagtattgattcttgttttaacttatctaattgccgttgaacacatcggtatcatggggctggaaatgtttgccagtgctgaaacaaaggcgaaagcttttgacatgccgctggactttgtcaaactaccaaatgcccgcgtggcactggccaaccaaggcatttataacggaatgttgggcgccgtaattatcatggtcaacctgttattagccggccaaacgctcaagattgtcctcgccctattaatgctctacatcttcatcgttgccctttacgggacatttaccgccaccaagaaaattttcttcttacaaggcttacccgctttaatcacattattgttaatcttattcttctaaaaaagagctttaatcatgacaaatccaattctcatcaccaccaccgaaactattcctggtaaaaaatatgaagtgctcggtgaagttttcggtttaaccactcaatccaagaacgtcttcaaaaacatcggcgcttcattgaaaaatgtcgtcggtggcgaaatcaaagcctatactgaaatgatgactgaatcacgcgatgtagccatcgaccggcttcgccaaaatgcacttgaaatgggcgcagatgcggttgtcatgatgcgctttgattccggttcaatcggaacagatatgcaatcagttgccgcttatggcacggctgttaaatatatcgactaacaaaaaaagatgaacggttccctgatattcaggaaatcattcatcttttttaatttacttattaattctaatcaacaacttaagccgctggtgctgcgggttgtgcgctatttaaagtccacgtaatgttgctcgagaatgtatcaccagccgcaagttgaatacttggattggcacttaatgctaatttcccagcaacttgccatgttttcgacatcttatccgtcataatcggtgtttcagtaccattatcagataatcctacgttcgttggcaagccagtcatattaatggctgtgctgcttaattgtttgcctgtggttgatgccattttactcatcttcgctgtcaatttccaacctggcgttgctctggtatccgtgattttcaacccatcactgacctgatattgcttgtcctgagcagttgtaccaacataaatatcttttgataagacgttcccaaatctaaagctaggcacttgatccaatgacaacttaccaactgctggttgcgcttgtaattcagcttcgttagaaacaatcgtaactttttttgaacttccacttgattcttccgttacgttagtcgttaatgttagctgtgctcgataactctttccagccgtagttgcagctgcagcatctttcatgaaagtactatctttactaaaggttagtggttgttccgtatttaagttcgctaaatttgtaatgtcacccttaagattagaaacaccactattagtagcgggggttattgtcttatcctcaccatctgtaaattgccattcataatgccaattactcgttgaaccagatgccttagctaggtctgataaaccatcaactgaccaagtcccaccgagattcgccgctttcttgtaggctgctaacccaccaacataaaccgttttctctttagagacattctttgcagcaattttatatttagctggaatccctggtgtattcggatctttattcaattttccagtataatacgaatctggcttatacttttcaccctccacatcaatcgcttcgttaactttattcacttatttcgtgcgtttaatagtaaagtgattaagcagttggtgcagttggtgttgttgatgaaagattccaattaattgttgttgtgaaactctcatctttagctaaatcggctgctggatttgctgctaatgttaacgtagctgcttccatcttgaaattatcgacaccatgtttcccgttacctttaaccacttcaacggcaggagaatcgtccttaacagcacctgttaaagtttcaccaagtgaaccagtagaatctaaattcaatattgcgcctgttagtttattagcatcatctgtgaattgagccatgtcagctgtcaacgaccagtcagatttgcctaaacgtatatcagcaatttctaaagcgccagctgttttagcaactttaccagtaaagccagcataaatctcactagcttcaattgtcccaaagctgaaacttggtactgattttaatactaatgtcccattttcaggatctgttgggtttgttggatccttagcaacaacactaaagtcggcttttgatgtttgcggagcaactgcgtcagctgatactgaccccactgtcattgctgttggtgctaccattgttgctaatgctgaaaataattttgtcttcattgataattcctccaaattattattaattacatttaatatagtagcacgcaattcaattgccggataacaaaaaatagataccatacggtatctatttttacccttcactaattattcgttaaaccgattccaatcctgtcctagcagttatttccccattaccattcttctagtgtaaacagcttgcccggaatgcatgaccgcatcatccacgattgagactaagcgtgcttcacgggtaactgccggtgtccaattttcatcaattatctctaataaagactcgtcagtaacttcagccaggtaatcaagcgtcaattgcaatgcgtctgctaagtaaccaattaataatgctttatcgatgataatcactttggctgcttcttctggtgaatgcgaccaatcttgcgtttcatcaggtagatctaatgcaaatttttgtgaccaacctgcacgtatccacaatggttgtatccctttcaaatccgcaatctgataatccatttcacgggcagtatgccatactaaccaggtcaccgatttaattagtggctgcggcattgtattggcctcagccactgtcatttgttccaatgtatcgagtaatcgttcttgagcgcgttcgaccgttgcacttaatagttgcgttgcatgcatcttatcatcctccatatctaaaagttaaccccattgtatcattaaaccactactaggcctttttttatgaatttaccaaaccattacgaagctttacactttattttcactagaacaacaaacactttacattattgtttatgcttaaccttgtaaagaataaaaaatcgttttacaagaagcaatcaatatgcgcatgagccaaacaatcatcccttacgtggcaacaacaactttattacttttggcagccggctgtaccccacaaaaaaatactaaacaatcgacagctcatcaatccacccttgtccctaaacaaaacatgagtcgccacattcaattagccggtgcgattaatactcgtgatctaggtggaattgtcacgaaaacaggtgccagaattaaagccaatcggttaattcgttctggtgaattagctggtttaacaacgaaggataaacagaagttaaccgttggaaaacaattaaataacatcgttgatttacggactagtagcgaagttgcggctaaacccgatcccgctttaagcaacgtccactacaatcactatgatgtcaccaagtctttagggacttcggcaagtcaagctgactttttcaagaatctcgataaggttgatggtgaagctttcatgattgatattaaccaaaaattggttactgatcccgcagcacgcacgaactataaacagttctttaatgtcttattgaataataaaagtggtgcgacactttggcattgtacagccggtaaagatcgtgccggattcggtactatgttagtcctcagtgccctcggggttgatcaaaagagcatcatggacgactacctcgcctctaataaatatcgccgcgccgaaaatgaaaagacaattgaacaaattaaggtggcaactcacaataaccccaaagccgttaaaacgatcactgcaatgatggccgtccgtaaaccctatctacaggccgcatatgacacaatgaacaaagaatatggtggcgttaatggttatttgaaacacgggctgggtttgactaaggcggatctcaaccaattaaaaacgatgtatcttaccaagagttaatgcttcatcaggtagattcactattctcgtctctccatttttttggtatactgctccttagaatcaatcagttaaaggagcctcatcatgtcacctgctcaacatctcattttattattgatcgtgatcattgctgcaatcggcgtcttaagttcatcagtcatcttattcatcgcccaacaaaagaaaaatgaccaacttaagaagaaatcgaatgtgctcttttgggtcagcatcctcgtgatgatgatctttctgaaactaatcgatatgcttcaataaacaccaaaaagcatgccagtcaaatttgactagcatgctttttttgcaatctatcttctaaaaaaccacccttaattctttgctaagttacaaaacttggtctaagcaattttattgttccccacctttgaggatgttatcttaactactaaaggaggtgtcactatgaaaaccttagacaatatcgcgcttactttattaatcgttggtggtttgaactggctacttgtcggtctattcaaattcgacctagtcgctatgttatttggcggtcaagcagctattatttcgcgcatcgtatatgtccttgttggacttagcgcattatattgcattaagttatttgcacccatcaacagcgcgcagcatgaatagctttctggagcggctttttatagggaccaaacatcctgctcgtctcaatcgctatccattaacgtgttggtaaaactgttatttcttttcaataacgcaaaaaagcgtgctagtcagcctcgactagcacgcttttatttttttattacttatacacctatgttgatgaaagcattgcatttaagtttatggtgtatcatggtgttatacaaattaaaattataggtagtttagaatgaaaaaaatttattttttatgtacaggaaattcttgtcgcagtcaaatggctgaaggatatgcaaaaaaaatattgccggcaaatgagtttcaaatcgagagtgcagggattgaaactcatgggttaaatctaaatgctgttaaagttatggctgaagatggagtagatattagtagccactactctaaattaattgatctaaattatttgaacacttcagatttagttattactttatgtggtgatgccaaggataaatgtcctatgcttccccctcaaaccaagagtttacactggcctttatctgacccagcgcaagccacaggaactttagaagaacaactacaagaattccgtaaggttcgtgacgaaattaaaaaattagttacaagtttgaataactacgttcattaataaaaaaacgccatacagtgccgcagtaaaacagtccaattaatttattgacttctaagtaaaataccaggagttttgctatgagttaactatgatcctaggtggtcactaaaacattccttaatttaggggctataattataaattagataatacattagaagctggagacaagattgtctagataatgtgtgagataaaatttttggcaggttatcatacataagacaaaatgtttttaaaactgataacgtatttatttcacaacaattacgcatttatttttgagaaaaatataaagcaggaggattacaatgctgaaaacttattctttaacaaaagatacattattagtttcgtcagaatcaaatatcaaaaactcttctgttgtctatgtttatggtgacgaacgagaatatatcgaatcttttgaacataaatatgactttaaaataggcaatatactaacgtttgatgaccgagttgcatatgacacgatgatagatcagaacgatgaaaaaagtttgctcgtaagttttttgtttcccgaggtacatgaaggtgggcatctagataatctgacgacatctgttgttttcttggtatttaagaataagttgataatttttacaaaacaaaaattaaaattcattcccgaactcttatccaatatggttttacgtgatgtcaataatttcatgcaggaagtacttttaaagatcatgcaaaaagatttccatgtgatgcttaacgaccttcgtggagtcaagggaaaaattgatgatttagaatcagaaatatcaacgtccggtccactcagaccaacgtttggtgatttattgactcttcaaaaatacatgatagctttgtcaacaacctatggcgctaatcacaaagcgctggatttcattaacaaaaatttcacaactattaacgatattgattttaccaccaaaaaaataattgatgagatatacgatacaagcgacacaatggatagaattattttaggttacagccaatatttggatgatttggaagatatgatagacaatatgatttcgtatcagctaaacatgattatgaaaactctaacagagatatcaatcgttttgactattccagcgattatttttggcttttggggaatcaatgtccatgtcccgtttgaaaagtcttcttatggtgtttttgccgtattgattatctctgctatactaagtctaatttgctggtttttgctgcgacgcaaaacatatttgtaaagtatttgtgataccctaatatgatttaaagcagaatttctttgttgactttttaaaaggctgattcctttcaataatttaatagcttcagcggcttccttcacagtatgagagttagaatattcaaagatagccatattccggctatctttttttcttttgggtctaccctccttatagttgggattgtgttgccttgcaaatattttaccggcttgcgtacgctcgataatcatatcacgctccatctccgcaaccgatagcaaagttctgacaatcatacgcccaattggggtgttatctatcgttcctaaatttgtactaaaaatcaattttttaaggagctaaaactatgcaacaagttgtcttacccatcaaagattcaaacgttctcaaagaggtgcaagataccttactcaataatttcaaagctggtcagcgtaactatacaatttttcaggttgggaaagcgacgctactaagagtcagtgacgttatgtgcctaaaacaagcagatatctttaatccggaaggctccattaaacaaaatgcattcattcacgaccgaaaaacaggcaagcctaataccttgtaccttaaaccagttcaaacagagcttttattgtatcgtcaatggctgcttgatcataaactagaatctgaatggctctttccgtccattcaacacccagaacggcatattacggagaaacagttctataaaatcatgagcaaagtcggcgatcttttaagcattaattaccttggtacccacactatgcgcaaaactggggcttatcgcgtttatacgcaatccaattacaatattggcttagtcatgcacttattaaatcattcaagtgaagccatgactttagcttatttaggcttagaccaagccagtaccgaaactatgttagatcaaattgattttggttagttttatttggatttttagttgttgccgaaggcaacttctgagacagattttaagcacaaaacctccactaatttttagtggagtgtaagtgcgccttgaccgagccttgctcggtttgcggactcacatagatgttctatgtgtaagtgcgcattaaactcatttcattccgtttaatgacgctaaaaaatagctaacttgatcattaaaataaaaggttttttttagttcaatgcgcacttacacgtcaactaactttgacgtgttttgataccccaaaaattgtattagatttcgctacgctcaaacaaatctttttaattgctttacaccgtttttctttctaaacttaatcacaatctttgaataactaactataaaaagatgcctttaatttaaacctgaaataattagctaatgttaggagtaactcagatggacgaaaagaaagtattaaagccaattgatgaaatgcttgctgatcctgggcaagttgatattcaagaattgtttgaagcttttgtcaatgaacctggcgagatcaaaaggaatctgtatgattccctggatacttatattttgcaaaaaagacaagaagatattattaatcgtcctggcttcgttatttagccctctaaaatcctgctgagggctttttatttttgctttggtataaatatatataaacagtctcaaaatcgctagaaacgagaaataaggcccttaaaaacgaatatagcagttagattcttgttaagattcagaaaaactaactgtttgctgtcaatggtagcggacgagcaaagcgtgggagcatagtgacttgaatttaatgtgagccgatttttgagtcgctcctttgtgttttttatttgaggtttggctctggtacagtagtacctcttttaaacctcttttagacccctatttagtcctactctcctaagggttacaggactttatcgactacattttgtctgtttatcgactacgcttatttacttctgtattcaaataaagtagtattattcaaggaggttattttatgagcaatgaattagttaaatatgatccagaactgaatacaattcctctgagaagatttactcctgtagaaatgaatcttttcttttcggttgtttctagaatgcgcgataaaggtgatgatactgttcggtttacttttgatcagttaaaagaattaagcgcgtataagccgaccgcaaataatcgatttattgatgacatacaaagtacatatcaaaaaatattaggtcttagatttggctctagaagtaaagatggacttgatagagaaatgtttgtcatgtttactcgatttgaaatcaagggttcggcagaagtcccttatgttgatattcaaatttaccccaaggcattgaaacttctaaataatcttgaaagctgggttcgatatgctttagcagagttcagagatttaaagagtagttatgcaaaaacgatgtttcgtctccttaaacaatttcgaactactggttatgcttatttttctaaaagtgatttttttgaattacttgatattccgcaaagctattggaataaacctgcaaacgttgaatccagagttattcagccaattaaagaagaactaactcctcttttcaggggtctaactattagaaaaaaatatggtaaaggccgtggcaagccggttattggttactcatttacctggaaatcagaaaaaaagaacgcagacgacttctcacaagggcaatttcaagatgaaagacaaaagcttttcaatattcagcataatagtgaactaacagaacatcaaaaatggcgcgccattgataaagttaaggggttaactttaggctcaactgagaaacaagcggtggctgagaaacaagcggaacacgataaaaaaataagagatcaagcaagaaaagaagcacttgctgaactccgaaaggggtttggaaatcatgcctaaaactattagagaacttgctgatgaattgggcgtttcaaagcaggctatatggcaaaagataaaaagagatgcgtcaatcgatttacgtcaatttacatcaacaaaaggcaatactgtttacgttgatgttgatgggcaaaaagctattaaagcaatgctctcaaacgattcgtcaacaagataccgtcaacaaaaagatgatgttgacgacaacaaaaaagatgcggttgatggacaagatgaagtgaaattccttcgaaatttagtatcagaaattcaatctgaaaattttaaaatgaaagcgcatattccacatcgagaattaattatattcttatttttggcgtacttaacgaatcgaaactttattttttgttgtaaatgcaacaaaaatattttatactatttttatcgaaatgaggtatgccatcatgactgaaattctccgcccaatcggggttatagcccgcgcgttggaatccattgctaatattgaattccaacaatatgacttaacccgcgggcaatacctttacttagtccgcattgcagaacagcctgggatcattcaagaacgtctaggtgaattattaaaagtcgaccgcgcaacagtcacgcgcgccgttcaacaattaattaagcatggtttagttgaacgacaccctgacaaaaccaatcataagatcaaacatctctatctcaccgaggccggtcgagccgtctatcccgccatcaaagctgaaaacgattattcaaatcaaatggcactgactggactgacgaccgacgaggcccataatcttgaagcactcctaaacaaagttagtgccaacgttgccgcaaactgggattttgtcaaaaagggacacgtccgacactattacaacaaaggaggcatcacaatgccaattcaagctgtcacattaaaccaactacctgacttacaatccatcagccgtgaaactttcacagcaacttttggcgctgaaaatgcagcagaagatctcgctaactacttagaagaagcttataatacagaccgattaactagcgagctcgagaatcccgattcgttcttctattttatttatcaagatggcgaagtcgctggttatttaaagctcaacattgatggcgcacaaactgaaaaagctgccccggattcactggagattgaacgtatctatattcgacagtcctttaagcgacttggtttgggaacacaactaattaaccatgcactagccgtggcgcaacaattccataaaactaacgtatggctcggcgtgtgggaacacaacactgctgcacttaacttttacaaaaacctcggcttcagccaagttggtgatcacatcttccaactcggaagcgacgcacaacgtgatctgattatgcaaaaaacattaaccgtttaaacacacaaaaagaggcaacctatcaggttgcctcttttttcgattattgatgcgcacgttcatattctgtatcacagtcagctgtaaaaatggattctgttccggcttcaagtgcctttgtgtaataccattctttatgatctagcttcgtcaattctacttgcagtgattcaatctcgttagccaacatttgccgccgttgttgaatcaacgccaagcgttggtccaaagtttcatcacctgcagttcgccaatcgatgtattgcttaatatcttttaactgcatacccttttttttcaaacattcaatatcacataaacagtctaaatcagcttgccggaattcacgccgaccagccggactgcgtttaataaacggtaataatccttgttcttcataataccgtagtgtcggaatactcaaatcatattgttgggcgactacgccaattgataatgccatattaaccttccttatacttgcttaaaaatcaacgtcatctggcaccatgcattgaccgcctaagttttccaaagcactaatttgggtcatttcactatctgttaattcaaaatcgaagatatcggtattttgcgccattcgttcttgatgagttgatttaggtaatggtaacacaccttgttgaatccccccaacgaaggcaaacttgcgctgccgttttgccgtgcctcgtcgcaattgttgcaatcgtttcattcgaaagcgcactggcttcaccaagtggtgcccaagcttcgactaagatgtcatgcgcttgattataacgcacagcttctgcttgtggccagcccggatggacttcgatttgatcaaccattggtttgataacggcggttttcatgagtgcatctaaatgatggggcataaagttcgacacaccaattgcacggatcttcccttcgttatatagatcttccattgcacgccaagtttcagcatttaattcagcatctttggcttcaaattgtttagtgttagctggccaatgaattaaatataaatctaaatagtcaacacctaacgttgcaattgtttgtgcaaaggcagctttcgtagcatcatagccccgttctgtattccatagcttacttgtcacaaagatgtcttcacgcgcgatatcactttctttcaaagcggcaccaacaccttgttcgttgccgtaaacggcagctgtatcaatatgccgatagccaactgataaagcttctaagaccgcttttttcgtttcttcatttggtgtttgatatgtcccataccctaatcctggaatggtaacaccgttgcttaaggtcattggggctgttaaggcagataatttttgcatttaaaagtctcctttttctaatcaataagactactttacaacctcaagctgacttgaggtcaaccattatttgggggcctatcactttttttaaatccgttagtgcttccctaggaattatgcctgactaataagagccttaaactaaacttaactattctgatttttagcggcctaatcccatcaataatcgtatcataaccactgataattcctatgtaagggttttatcttcctattttaggaattcgcggtataatatagatatcaaaagtagttaatggaaggaagcgagaaacatgaaaaaatttctattaggcagccttatttttgtaggtgttacagcaaccggtgcttgtttattagctaagaaaatggaactttttagagacgattctgtggattacgaaaaattcgaaagccgttagtcactcgtcatttctaaactgaatctaggaggtttttcatatgattaagaaaaaagcaattatgattggcgctggcctttctaacatggccgcagcagtctatttaattcaagaaggcggttggtctggcgatgcgattacattctattcattagatgaccatggttcaaacgatggggcatcagtttccgaaacaaccgatgaatattggaataaaaaccatcctctcgaaaatactaagggctacgttgcacgtggtgggcggatgcttaactatcggacttatgtcgatttaatggatcttctaggtcggattccttcagcaactgaacccaatatgacggctgaagaagatacccgttcattcgatgctcaacaccgcacattcgacaaagcacgtttattagaaggtagtaaaggtattttggatgctggtcatctcggctttaataataaggatcggttattaatgaccaaattgattatgatgcccgattctgaagaagaaaaattagacaacgtttcaattgccgaatacttcaaggacgatccacatatgttccaaacaaacttctggtacatgtgggaaaccacctttgctttcagaacccaaagttccgcacaagaattacgccgttacatgcaccaaatgatttatgaattcactcagattgaacacttagtcggtgttaaccggacacgttacaatcagtacgaaagtatcatgctgccgctgattaactacttaaaagcgcaaggttgtcacattatcctcaatcgacggattactgacttagactttaaagagactcagatgaccgatgaaattacggttactggtatgacaatgactaatactgagacagatgaagttgaacacgttacggtggacgacgacacagcggtcatcttcacaaacgggtcaattaccgattccgcaacacttggcgattataatacaccagcagctgaaaacatggattatggtgctgctgccggtctgtggaaacaagtcgcttctaaattctataatcttggcaatcccgataaattcttcgctgaccgcaatgccagtgagtgggtcagcttcactttaacgactaagaatcatattttgttaaacgaaatcgaacggattacaacgcaaattcctgggaatgctttgaattcgttcctatcaacgaaaccaatcacaccacttggtcaaaaagatgtgaatatgtcgattgttgttcaccatcaaccacacttcacaacgcaaaaaccaaacgaagcggttatctggggttacttcctctacccacgtcgtaacggtgaatttgtggataaaccttacatcgaaatgacgggtaaggaaatgcttcaagaattaattggccaactatcaaaagttgatcctggcccaatcaatattcgtgaaaaagaagctgaaattatggacagtgtcatcaataacattcctgtctatatgccatatgcttcagcactctttaataatcgtgccaaaactgagcgtccagaagtcatccccgaacattcaaccaacttagccttcactggtgaattcgttgaacaaccttatcagatgattttcactgaacaaagtgctgttcgttctggcgaaattgcagcttatcacttcgctggcattccaatggccaagttagtcgatacaccacgttatgatcgtgacatcaagacattgatgcgcgcaactaagaaaatgtttgcttaatccaaaaaagcgcggtagatttttacaaatctaccgcgctttttttctttaattaatcttaaaaacagattaaggtgatttttttatgctcagttactaaataccattttgaaacgcgctcgtcgaagcaatgccttatgtttagctacatcagtcaaaccactgactgcatcagttattcgcctgcttaggctaatccgcacgcactacccgcttagtcgaccacttttcttaaacttgttgtttagttgggcgaattaagacttcactgaccactacatgttttggttggtcaatcgcatataagactgcgttggcaatgtcttctggattgagggccaacgctgattcttctggtgcatccattaattgcttaaccccttcgaaaacagcagggttgccaatcgtattcaccaattctgttttaacagcccctggtgaaacaattgttgaacgaatgccgttatctttttcttcttggcgtaagccttccataatagcgcgcactgcatatttagtcccgttataaacggcagaagctggataaaccacatgtccggcaaccgaatcagttgaaataatcaaaccatcttgttgggcttgcatcgttggtaagaccgcaccgatcccgtttaaaacgcccatgatgttgatatcaagcatcttttgccattgatcataatcgcgttcgctcaggtttccttgtggcatgacgccggcattgttgtataaaacatctacgcgaccgaaatgatcaagcgccaattggactaagctcgccatttgatcccgattagtcacatccgttgcttgataaatcgcatttgcaccgatttctgatgctaaagcttgtaaacgatcttcacgacgagctgctaaaacaaccttagcccctttgcttactaataatttggcagttgctgccccaatccttgatgaggcacctgtaatgatcacgactttattttgaattgacatgttaaaactccttttctaatttgatttgacgcatgactttcgctggcgttccggcaacaatcatattgtctggtacatctttggtgaccgtggcgttagcagcgacaatcgcattctcaccgaccgtcacccccggtaaaatcgttgcgccggcaccaatccatgcgttctgtttgatatgcactggtttaacgaataaaccgcgccggtcaggcttttaaagaagccctcaccaaccagaccaataaaaagccgccacgctaagcttgacggcttttttaacccacttgatttgcgaaattgcttaatttatgtccgttactttcccaaaataggggctctataatgcatattgaatcttatctggaggtcttttgatgatggaaaaaactgaaaaaatcgcaattttagaaaaactggtctcaattgatacaacagaccaagcagaaggtgtgattgccgactacttagccgatctattcgcacaacatggtatccatactgaaaaagtggcttctaaaccaggccgcgaaaacttagtggcctatctaggcgaagcaaccgacaaagtcctcggtgtcactggtcatatggacgtcgtcagcatcggtgacgcagcaaatggacgagtgatcccttcactctaaccgctcgcgatggtaaactcttcggtcgaggcgcaatcgacatgaagtctggtctggctgcgcttgtgattgcaatgatcgaattacacgatgaacatgttcctctaaacggccaaatcaaactactcgcaaccgtcgatgaagaaaagaacgaaactggtgcgcaaactttaaccgctcaaggctatgccgatgatttaacagccttattagttgccgaaccatctggcgttgataaacaagccttggcaaataaccccgataaattccccacagaaatggcccaaaaactccttgcggctaatcaaaccaatgaacaacatttcttaattttcgcccataacggttcccttgattttaaagtgacggcaactggtaaaaccgcgcacagttcaatgcccgcactcggtattaacgcaattgatcatttgcttgcctactacaatcggcaaaaacaatacttcgatcagaaacatcctattgatgatgtcctcggcgatatcgtgcctgtcacaaccttaatcaacggtggtgaacaaattaattcggtccccggtcacacagaacttacttgtcgggttcgtacaacccccgccttaactggcgaccaagtgattgctgacctcaataccatcattgcggaactcaatcaacaggtagacatgaatctggaattgaccgtcattaataaccaaccacccgttaagagcaatccacaagcaccattcattcaagctgttcaaaaaatcggggcacaaaagttatcccaagcttatccactgatgcacgttgctggcggtaccgacgccgcccaccttgctaagcacaatcctgacttacctgtggcagttgtcggccccggcaatgatactagccacatgattgacgaatatgttgatgaagaaatgtacctcaaacacatcgacttctttaaagccgttatgctggattacttaaaataacaacacaaaaaaacatcacctaatatatgccctacttaagagcttatcggatgatgttattatttaatcgtgatacgccttcaagctatttttaagctaaggcagtattgatttcttgtgctaatgtttctttccgttgtaacccaaccatttgttgcactaattggccatctttcatgaccaacaaggttggaattgattggatgccgaattcagccgccaagttttggttgtgatcaacgtcaactttggcgattttagctttacccgcgtaatcgtcggctagttcttcgacaattgggccttgcatccgacatggtgggcaccatgttgcccagaaatcgactaatgtgaccccttcttgaacttcatctttaaagtttgcttcagttagaatttgtgttgccattgcgatcacctttcttttcaagaaaatcattcaacgatttcattgaattactcataatataccaccattgggacgtgccgtcaaaaaggacgcttcatcttattccgtttcggtcataactcgcgaccattcccacactgattgattaaacgttgccactttaaacccagcagcttgtagttgttgactggcaacattggcgtaagcacatagacgaccacgacaataaaccaccacttctttatccttggggagctcagctaatcgttgatccaactgatcatatggcacattgcgtgcccctggtaagtgttgacttgcaaactcatctgcgggacgcaaatcaatcaaacacacatcgtctgccattaatttcgttttcaatgcgtcaccagttaacgcttcgggggcacctgtttcttgcgcgagtgttttttccaaaatcgtcatctctggcaaagtttcttcgcagacatcaaccaagagggttaccaattgtttgacccgttctgaatttaaacgataagtaacaaaattcttctcgcgttcaatcgccactaagtttgtttgtttcaaaatttgcaggttccgtgaaacggtagcgacacttaagccgactgtactggctaagacttccaccgttttggggccttgcgcaagaatgttcaacagttgtagacgcgtcacgttccctaacgacttcccgactttgaccacctgctcataaaccgcatcccggtattctgtaatgcgttcatccactttcatcgcctcccaacaatcaacgcctttattgaatagaatcaatttaacatttctagacaagtgggtcaactaaacaagctaggcaattaaagtaagacacctcagttaattgctttcttcaaatcaacggtgccctgattagcttctttatctgtaatttcaaaaattagtataaattgccactcttgaccgactttatcagttacgttcatttcagtatatttccctatctgaattcctaattaaatgaactaatgtctaaaataaaaaaagaaccaccactcaagctatgtactagggtcctgtcaagttgccggatgaaataatataaaattgccgtcctttttgaatatgtgcatgctttctacaataggaagagaattcatagttcactgggctaccagacccccttacaagttgaaattgcaacacttacgagccaaatggccgcctgatttaatgctttccagggttcaaataagttattatcgcgattaatgatttatttgagctgtggaaggtaaacgcggttctgaatgtctcttaaaatctgtctcaaatattgacttcaatccattgaacatcttagagcgattaaagcactataataaataaaaactatccacaacctgattgggaagggtgtggatagtttttttgtggaaacgtgctttttaattgcaacaccttccgcttaatctaaaatgagccttaatctcaaaagacgagattgaggctcatttttaattaatgctcagaggcaaatcgctttaacagcactctatgctttgtcgaagtagattgttgcgattgtgcctaggatgatcatagcgatgatgagtgcgatgggtcctagtagtgctgtggcggttgttagggctggccaggctggtgcgacgccggtttgggcaagaatccagatggcggcaatgacaacgccgagcacaccggcgtaaacgtattcgacgaagtgtgctaataggtagtgcattaatttagcaacaatcacagttccgatgacggccccaatgatgaacggtaagaggagcgcgacgcttttgaacgcttctgtggcttgtgtcaagcgtcctgtgacgaggtagaccattaagtcgagtagttgactgacagcgtgataaacagtgccatattgcttcacaatcatgagcatgattgacccagagacgcctgggatgagcatgagtgatactgagaagaagccggcaaatagtaacgtgccaaagtcttggagggtagtgagttgtttgatagcgatgtcggattcagattggtgaccaccaatctgggtgagtagtagcataattgcgccacagacgatggcgattaacactttttgccagttgagtccggcgagtctacgccagatgaatgggagactgccgacgacaagaccgatgaagaaactgtatgccgctagtggataagcggtgcataaccaaagaatgattttggtggagagtaagacgccgatcccagcgccaatcccgattggccataaaaagccaattgcttggcgccaatcttttttgaattgcgcgatagccgccagaagcggttcgtatagaccaacgataacggcgaaaatgctgccggatagaccaggtattacgagtgcgacgccgattagggcgcctttgagtgcgttaataagtggcataagcggttctcctttttatatgaggggacttttatttggtgggaattgtaacgggtgttgaaggtaatgggacaccagcttcattcaaggcttgcaagtaagcctgtaagaaagtacggttagtggcagcttgttcgccgttagtggtgtgcataacaatctggtaagcaaggacaccatctgcgagggtggttaccccgagaatcgtagggccatcttgtatttcaggatgtttgggcaccagttgcacattgacttcattgacggttgccgctaacagttgtaagtcggtgtcgggtaagatgcgaatgttaatcagaacacgcatatcattgcgggataggttgctgacgatcgagatattgcggttaggaatgaaatttaaggtgccatcgtaactttgaacttgtgtggttcgtaagccaatcgcgttgacggtgccttctaccgtaccaattttaaccatatcacccacatcgaattgttgttctgcgaggatgaaaaaaccggtaacgatgtcgttgacgaaaccttgtgcgcctaacccaatggctaaactgaagatcccagcgccggcaatcaaggtaccaacaggaacgccgagaacgctgagtagcgcatagagatagaagaaaatcacgaggtatgaaaaagcgttgaccatcaaagtataaatggtgttcatgcggttacttgagaaaccatcagttttgcggtattttctgaagctacgcttaatgatgtatttacctaagcgattgatgaggtagaataaagcggagagtaggataatttgaaacaatccagcaacgagggtgctgagtaatttatcccagtcaattgaagtgatgtagcgcataaaaatattggtctgtttctgaacagattcgaccggagttggtgcggccgctaataaacgtgtgaacatgcgtgaaactccttttttgtagcatgtctttagtttagcaaatgtcagaaaaaatggcacctaatatagtgaagataattgaaggttaagggaaataatgctattctagtctttaagagacaatgtaatagataacgaagtaggaggaacaaatcaatgacgggtggtcaaattgcggcgctaatcgccgcaggggcttttgcggtcctagttgtttttctaatagtgatgctattaaaagtcacaaaagtattaacggatgtttctaaaacagtaacggaagccaacaagagtgtcacggttgttactgagaatgttgatattttatctaaagaagtagaaggtttactcagcaaagccaacgtattgctagacgatgtgaacgggaaagtcgctgacttggatcctgttttcagagcggctggcgaacttggcgagagcgtttcaagtttgaatacggcaagtcgcaatttaacggaacatgttaccaacgttgggcggacaaccgctaaggcaacggtcgcttcgaaggttggcgcaagtgcattaagattttaccaaaatcgacgtcaaacaaaggataaggagtaattctcatggcaaaaaaaggacattttctattaggtgtattagtcggtggcgcagcagccattggtgcaacattaatgttaactcctaagacgggtaaggaattacaatcaaaattagtggacttaggtgatgatttaatggatcgcgcacaagactactactatttagcaagtgaaacagcagcagacttaaaagacgacgcaaagctacacatgaatcgcgtccatgattatgcaagtgattggcaagacaatgcgtctgatatcaaagaacaagcaaaagcacaatttgatgaaaaaacagcagacttgaaatcacaatttggcggcagccttgaagctagccaagaagatttcgacgatatcgtgatcgacggcaagagtgcatttggccaagccaaagacgaagcagccgccgctgttgaaactgttcaagaagaagtcactgaagataaataatcaatgaaaaagcccccgccaagcctgatttagcgggggcttttttgcttgtttgaattgacgactagtgcaaattttaaaagtcggtgttataatgaaagcatagaaaaagagccgtgcgacaacacgactcttctccacagtccgcttaagacggtggcaagtttttggtaaaaaataaccgtgactcgtcaaagtttagacggttatttttttggataaggtgatttttttaattaagtgcaaccaagctgataatcaaaatatgaaatggatgacaacagcttttttaggctaaaagtcgtataatgacagtattctaaatgaaattggagatcataatatggcagaattgatgcgtttttatcaaagctttcaaccggaacattatcaagtttttctagatattaatcgggctcaaaaacaatttagtggtcggacgacaattacggggactgctaaagaagcacttgttttaattcatcagaacggtttagtgattgaaacagtgacggctgcaggtaagagtgtgccgtttacagttgataatgacgcaaatgccttgaaagtcgaagtcggccaacctggcgaagtgactttggtaattgcctatactgccgctttaacggattcaatgatgggcatctatccttcttattatcaagtcgatggggtgcaaaaagaattaatcggcacgcaatttgaaaccaattttgcgcggcaagctttcccatgtattgatgaaccagaagccaaagcgacttttgatttagcggttaaattcgatgagcacgaaggcgaaacgattctgagcaacatgcctgaaaaagaagtcatcgatggcgttcaccactttgaaacaacggtccggatgtcaacgtaccttgtggcctttgcttttggtgaattgcaaggggttcaaactaaaacggagagcggcgtgcaagttggcgtctttgctactaaggcacatcaagcaaacgaactcgattttgcattggacattgctaaacggtcaatcgaattctttgaagacttctaccaaacaccctatccattaccccattcatggcagttggcattgccagacttttcggccggcgcgatggaaaactggggcttagtcacttatcgggaagcttatttattactcgatcctgataatactgccttggatacgaaacaccgcgttgcgactgtgattgcgcatgaattagcacaccaatggtttggtgatttagtaacgatgcaatggtgggacgatctttggttgaacgaaagttttgccaatatgatggaatacgtcgcaatcgatgcgttgcagccggactggcatatttgggaaagtttccaaacctcggaagcagcggcagccttacaacgtgacgcgactgatggggtccaatcggtgcatgtgcaagtcaataatccagccgaaatcgatgcgttatttgatggcgcaatcgtgtatgccaaaggcgcccggatgctcgtgatggttcgcgctttaatcggtgacgatgctctacgcgctggtttgaaagcttattttgcagcacatcaattcggaaatgcgactggcgctgacttgtgggcagcactggggaaagccgctaacttagatgttggggccattatgcgttcatggctcgaacaaccaggttatccagtggtaacggccaaagtcgttgacggacaattaacgcttaaccaacaacaattctttatcggtgagggtcaagaagttgggcgtcaatggcagattccattgaagagcaactatgcggcagccccattattgatgattgaccgtgaattggtactcggtgattatgctcaattacgcgccgacaatgggcaaccattccgcttaaacgtggggaacgaatcgcatttcattgttcattacgatcaaacattattagatgatattttaaatagtagtgctgacatggcaccaattggacaactgcaactactgcaagacttacgcttattagctgaaggacgtcaaatttcgtacgcagatgttgtgcctgttttagcaccttttgccaagagtgattcaaatgtcgtggcagatgccctttacacggttgctggcaacttgaagaagttcgttacaccaggagaagaaagtgaacaacacctgcgtcgattctttgaccaattgagtaaagcgcaagttgcgcgcttaggttggatggttcaaccgactgatagcaatgacgatcagttaatgcgcccaactgttttaagcgcagccttatacgctaaaaaccaagcagccattgatgcagcccatactttattccaagcgaaccaagaaaaattgatcaccttaccagccgcaattcgggtactggtcttgatgaatgaggtccaaaacttcgggaatgccgcgctttatgaccagctcttagcagcttatcgccaaacgagtgatgcgagctataagaatgatttgactgcggccttaacgcgcacgactgatcctgaattaattgcgaccttaattggaaaatttgaagatgccagcaccatcaaaccacaagatttgcgggcttggttccgcggcttactcgccaacgacaagagccaacaagcaacctgggattggattcgcaacgattggcaatggctagaagagacagtcggcggtgatatggaatttacaacgtatatcacctcgattgccgcaatctttaagaccccagaacggttggcagagttcaaagccttctttgaacctaagctcaacaccccaggcttaacccgggaaattacgatggacattaaagtcatcgaaagtcgggttgcattgattgaagatcaaaaagcagcggttaatgaaacaattgccaaacatatgtagtcgaacgttgtgcaagttaaattcaatttgaggggttttgagatgacgattaaattagtcgcgattgatattgatgatacattattgagttcacagcaccaactgctagccagtacgaaacaacaagttgctaaggccctggaacagggtgtgaaagtcgttttgtgttccggacgcccattagctggcgtggtgccctttttaaatcaactagggattgccggtgataatcaatacgtgattacgtttaacggcagtattatcgaaacggcgtctggtaaaatcttgaaagaagctggcatcagccgagaaacctaccaagcgattgacgactactcgcaagcaacgggcttaccgtataatgtgctcgatcaaaatagtgtggtttatacgagtaatgtgaatgttgcaccaatgacggtggtgcaagcttgggaaaacgaagctggtattcatattcgcaaaccgaatgaaatcgacgcggccacgcagatggtcaaagcggtctttacaggggccagcgaacagttagatgcacatgaaccacaggtacgcgcgcaatttggaactgataattatgttgttcgtgcggctgacctctttttagaagtgatgcacgctgatgttaataaaggcaaagcagtgcaatacctcgcgaataaacttggattcgcgccggatgaaatcatggcgattggcgatgagaaaaatgacatcccaatgttccaatttgccggtactgcggtgacaatgggcaacggttcagctgaagcataagcatggcagtaataggtcttaataccatattgtgattcaagtgatactagaaactttgttctttgaaaactggataataagtaatatattagttttaaaagccgagaaaacattgcgttttaaagagttttttaatagaaatatgaattagttcatatcgctaaactcaaataataaccctttaccgtaggtaaagttaggttaagttataaagggcgcacggtggatgccttggcactaggagccgatgaaggacggtactaacaccgatatgcttcggggagctgtaagtaagctttgatccggagatttccgaatgggggaacccaatacctttagtcgggtattatcattaagtgaatacatagcttaatgaaggtagacgcggggaactgaaacatctaagtacctgcaggaagagaaagaaaaatcgattccctaagtagcggcgagcgaacggggaagagcccaaaccaagaagcttgcttcttggggttgtaggacagaacattggagttaccaagttaagttgtaatcgaatcagctgggaagctgagtcaaagagtgtgataaccacgtagattaaacaacttaacctccgttctggatcctgagtacggcggaacacgtgaaattccgtcggaatccgggaggaccatctcccaaggctaaatactccctagtgaccgatagtgaaccagtaccgtgagggaaaggtgaaaagcaccccggaaggggagtgaaatagatcctgaaaccgtgtgcctacaattagtcaaagctcgttaatgagtgatggcgtgccttttgtagaatgaaccggcgagttacgtttatatgcgaggttaaagtgaaaagctggagccgtagcgaaagcgagtctgaaatgggcgagtgagtatatagatgtagacccgaaaccaagtgacctacccatgtccaggttgaaggtgtggtaaaacacactggaggaccgaacccacgtcagttgaaaatggcggggatgaggtgtgggtagcggtgaaattccaatcgaacttggagatagctggttctctccgaaatagctttagggctagcctcggaatattggatcatggaggtagagcactgtttggactaggggcccgtcatgggttactgaattcagataaactccgaataccattgatttagttccgggagtcagactgcgagtgataagatccgtagtcgaaagggaaacagcccagatcaccagttaaggtcccaaaatttatgttaagtggaaaaggatgtggcggtgcacagacaactaggatgttggctcagaagcagccaccatttaaagagtgcgtaatagctcactagtcgagtgccgctgcgccgaaaatgtaccggggctaaacataataccgaaactgtgggtggacacgtaagtgtccgcggtaggagagcgttctaagggcgatgaagctagatcgtaaggactagtggagcgcttagaagtgagaatgccggcatgagtagcgaaagatcagtgagaatctgatccaccgtatgactaaggtttcctggggaaggctcgtcctcccagggttagtcgggacctaaggcgaggccgaaaggcgtagtcgatggccaacaggttgagattcctgtactagtttattttgtttgaacgatggagggacgcaggaagctaaggaatgcacacgactggaaatgtgtgtctaagcaacaagtcttgagttgagtgaaatgcttgattctttaaggacaagttgtgatggggagcgaaattaagtagcgaagttcctgatgttacactgccaagaaaagcttctagtgagaaataaactacccgtaccgtaaaccgacacaggtggtcgaggagaatatcctaaggtgagcgagtgaactctcgttaaggaactcggcaaaatgaccccgtaacttcgggagaaggggtgctgaccgtcaggtcagccgcagtgaataggcccaaacaactgtttatcaaaaacacaggtctctgcaaaatcgaaagatgacgtataggggctgacgcctgcccggtgctggaaggttaagaggatgagttagcgtaagcgaagcccagaattgaagccccagtaaacggcggccgtaactataacggtcctaaggtagcgaaattccttgtcgggtaagttccgacccgcacgaaaggcgtaatgatttgggcactgtctcaacgagagactcggtgaaattataatacccgtgaagatgcgggttacccgcgacaggacggaaagaccccatggagctttactgtagcttgatattgagtgtttgtacagtttgtacaggataggtaggagccgtagaaatcggaacgctagtttcgatggaggcgttggtgggatactaccctaactgtatgaccactctaacccgcgccacttagcgtggcgggagacagtgtcaggtgggcagtttgactggggcggtcgcctcctaaagtgtaacggaggcgctcaaaggttctctcagaatggttggaaatcattcgtagagtgtaaaggtataagagagcttgactgtgagattgacaaatcgagcagggacgaaagtcggacttagtgatccggtggttccgtatggaagggccatcgctcaacggataaaagctaccctggggataacaggcttatctcccccaagagtccacatcgacggggaggtttggcacctcgatgtcggctcatcgcatcctggggctgtagtcggtcccaagggttgggctgttcgcccattaaagcggtacgcgagctgggttcagaacgtcgtgagacagttcggtccctatccgtcgcgggcgcaggaaatttgagaggagctgtccttagtacgagaggaccgggatggacatacctctggtgtaccagttgtgccgccaggcgcatcgctgggtagctatgtatggacgggataaacgctgaaagcatctaagtgtgaagcccccctcgagatgagatttcccattcctttatggaagtaagacccctgaaagatgatcaggtagataggctaggagtggaagtacagcgatgtatggagcggactagtactaatcggtcgaggacttaaccaaaggtgcaatgttaggcttttgaaatgaaatattacttattatgcagttttgagagaacgaagttcttctcagtgcgcaagcacaaaatagtgtggtggcgatagcaagaaggatacacctgttcccatgtcgaacacagaagttaagcttcttagcgccgatagtagttggtgggaaactacctgcgaggataggacgttgccgcgctactaccaatatactaattcctaaaagagccataatctctcttagtctttttcgatcaatccattttaatcttattctgctctctgtgttcattacctattccctactaactcttttttctagttgctgtttaattccaaaaaggatcaacattaaagctgtcacgcttgttattaagaaaccttctttaataccttttggaatatatcttagttttatactgctctttcctgattcaactggtacttgcataaatccatgattatcctcaagtaacacggatttcccgttcacagttgctttccaacttttatcaaacggaatcgaaaaaaagacaggctctttatgtttagcattcacttgtaattcaatactattctcactcttttttataacctttggagcttcttttcgtaacttttcaatattctccgttagggcatctccattaagtagtataaatttaggagattctgcgatatttacatttccttttaagcgcattttaacaaatgcattacttttgtgattggaactcttataaagactcaatacaccttcattatgaaaattaggataattatttcgtataatctggttagttttaaaatctaatttaccataagaattaacaccatcaattacagctatcttagtcagaagttctgaattagctggcatatcaatccgatactcaatataagcattcttaccatatgggctcaactgaatgccattatttttttgctttatttttacgttatgaacagtaaaatttggattatctattgttcgaatgattgcacttcttttatttttattaaaaaagagaagctgccgctgtagttcatttccttcgagtggttgattaatggttagattgtcattaataattgcgatcggtaaagcatttttattctgatacacttcatagtttccactattgaacaccttctggtatccaatagaagtcatagaatcattcatcaatgctattctatattttagccctaataaactatccacaatcgtatttccttcttgatatgccagtgatttattccccaaagtagtactatatccaaattgagataacgttgtagctaattgctgatatccaaaagtgttaaaccaactaaacccgttaaaattattgtacattccttggtttagcattgcatttggcgttactacagttcgatagaatgttcggtcctgctttaaataagataaagcagtctttaaattttgactgtcattttctttccaatttttttcggtagcgacgtatccgggtaagctatccaactgactaataacaaaatgcatattttgaatactatctgtcataataagggctaacgttaaccacttgattatatttattcctatatttttatagaaaatatagccaatcaatatcattaaagtaagcaaccctaacattacactattgataattagtatcccgttatctattacctgctttttatacaacgttaacaatattatgctgcataatagcaccgcatataccaatggttttagtacattttctaagccgatattaatcacaaaaccagtgattaatatcatcattaaactgattaaaaaactaaatctgaatccataccctgtgggttgttgaaatccgtgccacattacatatggatattcataaatataactaattaagaaacaaatctctaaagcgctcactatcacttttattcttatttttattttgggtataaaataaaaagctattacagcaactaacatcaggataccgcaatatatattagcgccatcaaataattgcgtattatggctaaacagatcagacaatgctatccagatactctgcttgcgttgcaagaatccaacttgcaagggtattttgggtcccgatttcaatgcataattaattggtaaaattagccacgctgataacccaaaactaagtattaccgaaattagaaacttaatgccagatttccatttcactctattttgaaggactattaattctactaagaaatatataaaaataccgatacctgccatatatgccatatagaaattagatatgaataacagtgttaaagtgcctgttagtagccatatcttacctttattgatcaaatgatcaacacccattaacgcaattggtattaatattatgctatcaagccacattacattaaatgcataaataatattaaatgacatcaaagcatacgctatggacaatcctaagcgataaacatagtctaattttattcttttattgataaacaaataaaatgtaatacctgaaagaacgattttagatatgattagaattgtcataaaaagcataatttgactatccttaaaaaggacaacgagaaaacttagtgggctcattaagtaataacccattattgtaaagaaactgcctcctaatcccaatttaaaactataaagaagtgttccgttatgtactagttgctgtcttaagtatttgtaaaagatactatactgcgtataactatctgctcgtatccataacttattaccaaacggatatagcccctcgtaggcagacaatcctacaagaatagctaataatattattattaataacattacactcaaaatagattttctatttttactcatgatatatatatatccccctcgggctttctttaatataacaattaacatgataccccaatattgccattaatagtccactatcttttaataaatgaaatataaacgattaatcattattaagaaggtggagcagatgaaagacgccccaagacatacaatcatattagggatagtggccacggtcattgcgtttatttgtggcatgttagttttaaagacgattttgaatttcaatttatggcttgcgattctaatcagtgcagtactaggcttatatgtcgggtttaatgcattctatagtacgtatttagcagaaatgatcaaaattgaagtggctaatcaaggattaacaagccaagacttagcgacaatgatgcatggtagggctaaggattatccaattgtccgcggtgaattgcgtctaatcatttctcggcgcaaacgcgcacagctgttagcgaagttgcgtgcacgggttagctaaggcttttgcatgaacgattgttctatgttaggataggactaacttattgaagggtgcgattacatgttaattgaacgaccattaattatgaagcttcgctctgtatatttgaagatgacgcatcgtgcagagcctaatattgattaaaagtcatctataggacattactggatttaacgactggtgacagtggtttatttgggtagtgactatggatggagtggtcgatagtcaatgattgtaatcatgacaggggtagcggatgctgcccctgttttttatttggaaagaaagtaggaataaaacaatgagtattttaaaagtcgaaggcctaacacaacagtttttagataaacaactttatgacgacgccgggtttcaagtgaataaaggcgaacatatggggattaccggccaaaacggggtgggtaagagtacgttaatcaatatcctcacgggcgtcattcttccggatgaaggaaaagtgacgtggcaaaagaatttgaagattggttatctcgatcagtatgcgaagttagcaccaggattatcgatctttgaatttttgaagacggcttttgcggatttatataagaaagaaaaattaatgagtcaatattatgcggactatgcagagagccttgatgaccaattgctcgaaaaagcgggtgcgattcaagaactattagaggcaaaaagcttctatgatattgatacacgcgttatgcaagtcgccactggcttggggattgatgcattagggatggatcatgatgtatcacaactaagtggggggcaacgttcgaagattattttagcgaaactactattagaagaacccgatatgttattactggatgaaccaacgaactatttggacacgaaccacattgattggctgagtgattatctcaatcatttcgaaggcgcctttatcacaatctcccatgattatgactttttggaacgggtgacaacctgtatcgccgatatcgaattcggtaagattacgaagtataccggcacactacaacaagccttccggcaaaaggaagagaataaggctagttatttaaaggcctatgagaaccaacaaaagaagattgaaaaaacgaaagcttatatccgcaagtataaagcgggctcccgttcgacaattgccaagagtcgtgagaaacaattggcacatatggatattttgacgccaccaagtaatcgcgtgaaggctaacttccgctttccatatcatgcaacggccagtcagattctattgacgactaatgatttggagattggttacgatcgcgcgttactaccagcgttgaacttttcaattggtcgtgatcagaaggtggtcttgaaaggttttaatgggattgggaaatcaacgttgattaaaacgatcattaaagaaattccagcaatcgatggggactttgagattgccagtacggtgaagtttggttactttaaacaagacttgaagtggccgaataatatggtaacgccattacagtatctacaaggcgaataccctgatcagaaacaaaaggaactacgccaagttttatcgcggactggtttaactgccgaagaagcgatgaagcctttgaaacaacttagtggtggcgaacaatcgaaggtgaagattgccgaactactattaacatcaagcaactttcttctattagatgaaccaacgaaccatttagatgatgatacgaagaatgcactacgaaaagcaatccaagccttcgagggtggcgtactccttgttactcatgaagaagacttctatcaaggtgactggattgataagattttggatgttgaatcactcattaaacaatagggataccgtagagctttgaagggttattggtaacgatgaaacgttgctggtaacttttcaaagcttttttaataaaaagcttgaccgcgcctgttaatcttggtaatatataaaagttgtctcgacgagggacgtatggttgatgactcagcgatacgaaataaaaaagattttaaaaaacgcttgttatttaaaccttatcgtgataatatattatatgttgcttacggagctataacttctaagtaataattaattaaaaatagttgttgacagacgataagttgtgtgatataattaaaaagctgtttcaatacagtagatctttgaaaactgaacaaagtttcgacaaaccaaatgtgaaattgataaaatttcaaataaatatatttaataatgtgaacctgatgtgttattgtattggttgcagagcaattgattgtccgtgatgaagttggcgtctattaaaatcgaacaacaataaggactgggtgaagactacatggctttttcagattacataacaaggatactcatctacacaattgtgtcgtatccaatcgtcgggggattatctttcattgtttccagtctttattactggttatttttagaacgcaaagatatgccacgttacttagaaaaagggacgccattcattactattttagtgcctgcgcataatgaagaagcttcgattgaatcgacaattgaacaccttgaagagtgaatgaattatccaaccaatcagtatgaagtgattgtggtcaacgatggttcaaccgatcaaacaggtgctattttgaatcgattgcagactcggtatggtgagaagcgcttacgtgtgattacgatcattaataatcgtgggaaagccgctgggtttaatattgcactcggattttcaaaaggccaatttttattatcgaatgatgccgattctaaaccggaagtggatgcattgtggaaatacatgcactatttcgaacgagaaggtggcgatcgattaggggccattactggcaatatgttattaatcaacaaaacatcgttggtagctgaagcacaacaaaatgaattgaactcgatcatcggactgattaaacgttcgcagctttcatacggtggtctatttgcattttctggtgctaataccatgtatcgtaaggcggcggtcttagatgttgggggttggcaagcggaacaaccaactgaggatatcgctatttcttgggatatgcaggtgcatggttggcaagcgtatttcgcaccacatattcgcttttttatggatgtgcctgaaacactgcctgagttggtcaaacaacggagacggtggactgccggtgggattcatgtgttgttaacgaaatcgatggatgtctttagacacccgattaaacatttggcaatggtacccattattgttgattacagtttaagtgttatttggtcgctatttttctggttaagtatgattgcgtttgttggtgttcaggtgttgtgcttggtccaaggggattggtcacgtctaattaccaatttctgctttgcagcgatttttatttcaattgagattgtggtgggcttaattcagttgattatggcgtcttactttaatgaccgtggacgatcattaaagtatattgcgtttgcgccatggtatatcctaatctattggatggtgaatactttcaccgtggcggttgaaatcggaccaacgattattcagattcttaaaggcgaggatgctggcgtttggaagtcaccaaaacgttcggtagaggtcgtcgctaagacaaaagaggagggcaatcaagatgactaaaccagactatatcacgcatcaagtgagtgaggcatcgttgacgaatgattggttttttactaagaaaaagacgggcaaaaaaatctggcaggggattctgattgccattggatggttaatgtgtctggtaccgatgaccattacgggggtcttatatactgtcaaaagtgttccgctaccagttgacttaatggcctttagaaggatattattacagactaattattactttttattatacgttgccgtatttgcagtcttctttttagggctttttctattgaataaattacgaaaatatcgtttgaaaaaaggtttgctgcggatgtatgatccgacgcgattgagacagcgcatcgatctagcagaggatatgtacttacaaaagtatggtccattagacatgcggcacgaacaaccacagattatcattccagattacacggatgtgggcacctatgaagtacggcaaagatttgattattttgaggaggaagaagatgctttctaaaaaagatcaagcaattgtcgatgacatgattgttcgtgagcgaaatatgaaaaaccgccaacgcgtgattggggttattatgcataagcgacggttgtttaagcaacgtttagtgatgtacgctgctattttaacaacggctggtttttgggtgttatacacttcttttgcacgatacggtaatttatccgtcatcaatattattcaagtgaatgttttgatgaccgtgattttactattcttcaatttttatatttggcagaaattggtgcgctataatccaatgcaattgtttatcaaacgtagcatagtggtagcttaatctgaaacgttatacactggcaaattaagttatttatagcccgtagaattaagtcgttttgaaaagatggagacgttacaatctaccaattaaataaatctacaattgaattttatttaccttatgaagatgttcaaaacgcgttaaaggaaagtgcgcaaaacccctttatacgtacaaaggatgaatgggtagtgggtaacaatgagtgtaaattaaataaggcacaaaaaaggatgcttaaggataaagaaatatataatcatttcaatttagaaaatattcccagttccatcaaaacggagctaaacaagatagtgcatgacatcgatgactaatactttaacaccaaacagaaaggggctatgaatatatagggtctataactatcaaatagtccatttttttagtataagagcagtaaaaccagacgtggaaaccacgtggtcttttagttgattcagtaaaagaagccgaagccaaagtgaagacgttggtttcggcttctttggcttttaattgcgggaacgcacacaaagagccaaaaaagattactgacagccatcttctgatggctgccagtaatcttttttaagttcttgttcaaaaggtttgataaaatcaaagctagaaactagctccggtcatgcttgttgcgatcattatcgcgtaagtcttctacgtgggcatcaccactcgtatcgatatctagttcttcgcggccgacgttttcacttacttgtttcatatcttcgcgttcttgtttacgaatgtcaacttcttctcgaacgaccgggcgtttgttgacatcgatctgttcttctttgattgggatcgtgatcgtgtcgtcttctagcgtatcattgacatcggtagttgcagccgcaccatctccgggctttctttcgatcacgatttcttctcgtttaaccggtacgtcgactgttttcgtctcattgacaacatttttatggatatcgactttacccgtcgtcacatcatgcttattgatatccaattgttcttctttaagctggatactatcagtatcagtatctagatcagttgcacgtgcagcatctgatgcatgtaaattatttgtgctagtgtcaccagctgcatgtctgcctgtaacattttcagttgcttgtgttgggtcgtttttataattattgacggtgataataatttttccagctgagatatcatctctatattggtaaagcgggtcgttgtttgcatggtcagcttcttcatttaaacttgaatcgtattcgtacgtatcagcagaaaatgcatctttgattttttcccatagtgagcgatcttcgtgagtcgtttcgacgccatttacgccggttttaacatcgattcctgacagtccagcaaaaccaaaatttgtagctgcatctttgttggtgtaaataatgatatcatcacggctatagccttctctttgcagttgttcgatcacggataaagcttcttctctcgtactgtaacttccaataactgttaaatttctttccaacatataaatccctcccatttcaactatttttttaaatacgcttacaattgcagtataacgaattcagcaaaaactttaaaagaaacagctcaagaacaattaatcgtcaaagctgatgatccagtgaatctttaaaatcttgtgaataacgaattgacataaaaatactcctatactttcattttacggactgaataaaaatagtccatttttttagtataagagcatttatcattgattgcaccattaggattgacgacattgattatgcaagatggtgttttccatattagtgaaggatcaccaattattgcatttttgccagtcattatgattggaattgtcttcggtctggcgatggattacgaagtgttcatggtctcacggattagggagacatacattgccactggagatacaaatcgggctgttaaaacaggattgcaagagagtggtccagtcattattacagccgctttgattatgattgctgtctttggaagttttgccttggttgaagatccaacgattaagtcaattggtatttcattagccagtggggttctatttgatgccttcttggttcgtctgattattattccagcgacaatcaagatattcggtcgtgctaactgggtattcccaggagcaaattactataataagtttaaggatgatgcgcaataaataggtattgtggcattaaaaatattttttttgggagttatgtacaaaaaaagacagcctaagctgtctcaagataaactcttttaaaattgtacgcctaatgaacctaagccagtcgcattccatttgtatccctcggagcgagcaatccgcatcaattttcggattcgttcagcgttttcattacccaataagttcttaccattcatggtccaaattgtaattccatttacggttttagctgctaccacttgagctggcatatcttctgtagataaatgttttgctgcaattaaaagaatatccttaatatgctgatcaatttctttgtgggccaaatcattatacatttcatcaattatttcgaaaacttgctcattaatagtctttgacattatatcaccttccgttaaccagaatataccacaacttcatgtttatgtcgctacttccctaatgattgtaattgcatttcactttattaaaaaagttttcaaatatctctttattgattttcgtgatgcatcatcacatcaattacacgtcgtattgacatccttcattaccttaagcagttgttgcaactggtccttcttctgctttcttctctttatctttcttctgtttccgaattttatcctttgcgcgcttataaacatctttgggactaggaagcccaaatacataaactaccatgatatcccttctttcttactttaattgtagactcaatcttacagtactacaaatattcgggattaaaaaagacagcctaggctgccttgataatattaatagattaatttatatacctctttgcccgaatctgttaaagtttcttgtactgcatttttaccgccaaacgtgccagacgccgtgaaacatagtccatttacttctaactccttgattgctagtcctaatgatgttattgaaatgtcattaaatatttcagtttttaataatccttgtgcaatatactcactgttatcaccgttcattattcctccaacagtgatgcttgctttattgggagctttcataatcggccatctattagctttctgcaatactaagagtgcctgtggtgatagtttggcaatcatagacaacacaactctcttatttgaaaagtgttcttttaaatcactatcattacttatattccttagaacgttggctaaaacatttaaggtatcatcatctgccggtgaatcattaagtatttctattaattttgaatataatgtcagaccatagggatccgtaattaagtcaacaatacattgtaacgctttatcgtggtcgtctgatttttgtacataagaagcaacgaccaaagattttttcatatcagatatgttttggcctagttcatcgccagtttcaatcacatcaaaaataagactccctaaagacccatttaatatatcaacaaccaattctcgacctttagattttcctgtatcgattgcagcctctgcatactcatcagctgttaacctctgttgctctattctttgcttaagcgtttttttatcagcctttaaaattgattctggattattgatcatttctaacaaactttctctatccataattttcaccctccaataaatctataatacaaaaccccagccataaaggctaggactattggaggtgaagtatgtgccattactggcaatatcgcaggtgtggatttgcaccacacaattgccgttttaaggcgtaaagacgctttacctattccgccactgcgataatatcctagccgggactcgaacccgaatcgtgaccgcaggtgcacttccgcgctgctctatttaagctactaggaatggttaggtccgcgatcatccacggcaacaacgtgctaaccccacgcttccagcaattagaattgaagtcgattaacctaacaaagtttgattaacgctaattgccgggtataacagatcgtatttttggcaacagcgcgaccaccgttttccgccggtgattactggccacagtttaagcgcgctttactaataatccataatactaatttatcacggaaatccggctaataaccacagacaatccgcacaaaaaccgcactttttatttcttgaactcgtgcaagtcttcaatcatgaatgcatctgcaaattgcaggcatgcccgattcttataatatctgaatcgagtttcaccatacccgctttcaagctgagctgctgttacagtgttttcttttacatagatactccatagaatcttcttttgcgtagttataaatacagtaataacaatgcattcacgtattatatagccacaaaaaactgtgtatataaccacaaaaaactgtgtatatagccacaaaaaaataaaataagtggctatataatgttataataaaagcataaagaaattcccgtctaaaagtttttctttatgcttatccaacaacacacccaaaggagtgtatttatatgactattataccagaatcaaagacaaggcaggtacagaccttgaatgaattatcaaaaagaaaagtcgttgaacataatagtttaatcacatccattgccaagatggataagacaccactcaaaatgtttgaactagcggtgtttttaattgataccgacaatccacctcaggatcagacggtttatttatcaaagaaagaaatgtttgctttctttaaagtggatgacaacgataagcatagtcgttttaaagaggcaattgaaaaaatgcaaaaacaggctttttttcagattaaaaaagaacaagataaaggttttaagtttgttagcattgtgccaattccatatgtagaatggacagattatcatgatgaggtattaattcgatttagtcctgaaattatgccctatttaattaatctcaaaaccaattttacacaacatgccttgtcagaaatttccgaattgaatagtaaatatgccgttattttgtatcgttggttatcgatgaattacaaccaatacgagcactatagtgttaaaggtggacgccgagaagaacaaattgacaggtaccgtaatcctgaaattggtatgaaagagttacgagaaatgactgatacgataacagaatacaaacgattcactcactttgaaacgagagtattgaaagaacctctagcagaaatcacaaatcataccagctttaatgttatatatgaaaaagttaaaaaaggacgcagcattgatagtatcgtctttcatatcactaaaaagcaggtggcagatgatattagttacaagttagatgatccaacttatattgacggtaagataaggcaagaagaaagtgaaaaagacctcgtatatgaagctatgaaaagtccatatacaaaattgctgatggaacatttcttgttgtcatatattgatttgacggatacggctattttgtcagggttacagaaaaatgtttatccactttatgacaaattaaaagagttacgtggtttaaagggcgtgaaagaacacttagcatatattcgagataaacaagatgactattctaaaaagaatattgctaagtatcttaaaaaatcgattggacagtatctaccaatcgttaaaaggcaggatatagatcatgagtgaaaatttaaaaacaatccgagaacttgctgaagagttagatgtgtctaaacaagccattcaatatcatattaaatcactgacaaataaaagtagacaaaaaaatgatagaggaattgttgttttgtctatcgaagaacagcgatttataaggtctaaggtagacaaacaaacaaacaaaaaactatcaaaaaaacagacaaataagagacaaacagacaaacaaaaatcatgggatatcaaccaatatttattaaatgaaatcgaagaagttaaaaaaatagagacgaacaactagcagtcaaagaacgacaattagaaaatagagatttgcaaatatctcaaatgcaaaacttgttagaccaacaacagagactagcgctgcaagataaaaaattgttagaagaatacaaatctgaaatcaaagacctgaaatcattgactacacaatcaaaaccttttgtaaaagaagaagttaatgatcataatgatttagaagagagcgccactcaggaccaaaataaatctaaaaaatggtggccatttagcaaacgaggacgagaaaatgattgattcaaaaattatggagaaaacaggggccattttgaaagattttggtaatacctatttttcagataatggcactttaaagcgccacaaagtacatagaagaccttgatacttatacacctatgttgatgaaagcattgcatttaagtttatggtgtatcatggtgttatacaaattaaaattataggtagtttagaatgaaaaaaatttattttttatgtacagtaaaaagtctagtggtaataagtcaagaagataattgatataaatatcgtgtaattttacaaaattggcaacactaaactaagcctacttaaaattcataaaaattttagtaggtattccaaagatttgcgtgaataactacgttattccttcaacacactctttggtggtgtgtaaagttggtgattgcgtagtagcgcatcaaccaaacgcacaaattttctggcggttaaaacaatagctcggcggtgcttatttatcggggtttcggtatatttctttttataaaaagctgtgtattcaggtaagtgattttttaccgagttggcggcttcaactaagtaataacgtaaataatgattaccttgttttgttagtggtgtgacttctgactgataatttccagattgtttaactttccaggatagaccggcatatttggcgacttttgcttgatcatcaaatcgttcgatttgaccgacttcagctaagatacctgcggcataaaccttaccgattcctggcacactggttaagcattgatattcaggaattatttcaactagtttttcgatacctttatcaatttgtttaatactttgctgtaatgaacgcatttgaactaccaaggtactgagaataatatcaatcgactcattcattaatcgcggcaactgatagctatttttaatggcacgctgaatggttttaaccagtttttcaggatttttaaagttactgcggccaacattttgaatcaattggacgaagtcctctagtggtaaattggctaattcatctaatgagtagttttcagtcattaaatgtacaattgtggcgctaaaaatgccggtagattctgattttaattccttactaagcgtattacatttataagttaagttttctaagaaatgttgtttaaccgttactaattcggtaactagttgatatctagtacgggttaaacgttgaagtgccatatatttttcttctttgataggtgacgttgtaaaacgttgaattcgtaagtagtcagcaattcgcatggcatcattggtatcagttttgtcttcatcgaagacacgagaatattgcttgattttaaatgggttttcaacagtgactaccgttggtagtgcatttaagtctgcatcttcttggaaaaacatagctggatgaaaactatatagtgatgttgattccataccaatcacaatctgttcaaatgatacttctgcgtgatgttttaaaattaaggctttaatttcagaagcaccatttaaatcgttagcaacacttaaacgatttaggattgataagttactatcatcggtcataaaacaagcatcaatcttttcagaactaatatctaaaccaacaaataatttcacaggaaggacctcctttcgagagttatttggaacttgctttgatactgcgggattccccagaaaatctttacacagctacaacctcgcgtaacagaattttaaccaattggacttatgccgccttcaaactactacattgaagataagcctgattgaaaacagctagtgagttgggagagagcgtaaagactcgggtaacggacttactaaagtagagttaactacaggagtttttagcaaattcccgatagatccattccatggtcctattatattctgaagaatcccgcagtatcaaagtaataattaaattttattgtaagccaacggcttataaatatatcttacgaggagtttttgagagtagacctctcaaaactaaacaaagtttcgacttcgcaaatgtacaaggttttccgtattattccttagaaaggaggtgatccagccgcaggttctcctacggctaccttgttacgacttcaccctaatcatctgtcccaccttagacggctggctcccgaaggttacctcaccggctttgggtgttacaaactctcatggtgtgacgggcggtgtgtacaaggcccgggaacgtattcaccgcggcatgctgatccgcgattactagcgattccggcttcatgtaggcgagttgcagcctacaatccgaactgagaatggttttaagagattagctaaacctcgcggtctcgcgactcgttgtaccatccattgtagcacgtgtgtagcccaggtcataaggggcatgatgatttgacgtcgtccccaccttcctccggtttgtcaccggcagtctcactagagtgcccaactaaatgctggcaactagtaataagggttgcgctcgttgcgggacttaacccaacatctcacgacacgagctgacgacaaccatgcaccacctgtcactttgtccccgaagggaaagctctatctctagagtggtcaaaggatgtcaagacctggtaaggttcttcgcgttgcttcgaattaaaccacatgctccaccgcttgtgcgggcccccgtcaattcctttgagtttcaaccttgcggtcgtactccccaggcggagtgcttaatgcgttagctgcggcactgaagggcggaaaccctccaacacctagcactcatcgtttacggcatggactaccagggtatctaatcctgtttgctacccatgctttcgagcctcagcgtcagttacagaccagacagccgccttcgccactggtgttcttccatatatctacgcatttcaccgctacacatggagttccactgtcctcttctgcactcaagtttcccagtttccgatgcacttcttcggttgagccgaaggctttcacatcagacttaagaaaccgcctgcgctcgctttacgcccaataaatccggacaacgcttgccacctacgtattaccgcggctgctggcacgtagttagccgtggctttctggttggataccgtcactacctgatcagttactatcaaatacgttcttctccaacaacagagttttacgatccgaaaaccttcttcactcacgcggcgttgctccatcagactttcgtccattgtggaagattccctactgctgcctcccgtaggagtctgggccgtgtctcagtcccagtgtggccgattaccctctcaggtcggctatgcatcacggtcttggtgagcctttacctcaccaactaactaatgcaccgcgggtccatcctaaagtgatagccgaaaccatctttcaaccttgcaccatgcggtgctaggttttatgcggtattagcatctgtttccaaatgttatcccccactttagggcaggttacccacgtgttactcacccgtccgccactcactcaaatgttatcaatcagaagcaagcttcttcaatctaacgagagtgcgttcgacttgcatgtattaggcacgccgccagcgttcgtcctgagccaggatcaaactctcgattaaaagtttgtagctcttgttttgttcctgaattattcatacttttcgttgcagttaaaactttgtgcaaagttactttagtgtgtaaaaaaagcagctttttgttagttttgttgtcggactgtttaaaaaaggacagacttcaccctttccctaagaaaaacattttttattttgtgagttcacagcggatatatttttagattttgaatcttgaacagtgtctgccaaaataatttatcgaacacattggtctgagataaatggacccagacttgacgcgcatggtgcgtgaccttagctgccacatggagtaatttaaaacggatcgtcccgacctgagcgtgtttaagctttgttggtaaaactaagttcttcatggcttgcagtatattataagcgaccccagctaccagcatccggaactcattggcctcaaaactagaactgtccgttttatcaaagtgaaagccacgtttaacttctttgatcaagtcttccatggaaccgcgttggtgatagagggcaaagacttgtggaccgcttaattcttccaagttggtcacgataaactcatggtcaaacagaaagttgcccgccggccgcgttgatttaataatcacacgataaggtcgtgaccaactttgaggacaatagtctcgcaggacatgccattggacttcagcttcggtgaagtcctggtcacccacttggatcaggttttcagcccgactttggagctggtagttcgcttttaaacgaatcacgaacttagcctgctttttatcacacgcatggtagatccctggagctgcgaaaccagaatctccccgcactaagacatccagggaagatccgtcataggcccgtaagctccgtaataaaaatttagtcgcaccttgggaagtatagcgattgccggggcgtaattgagcattcaacaagcagcccgataaagcatcaaaggctagtaaaggatgataaccgttggtctggtagtgaccgttataagcactcttttcttggtcaccaaacgtatcggcatgtgtcgaatctagatcaaggatcagctgatgttgatttagctgcccaagaacaaagtgagctaccgagccgagcaatgatttgactgaaaagagcccagacgctgaaatgtgattgataaagcgtgaaagtgtcggctgggaagcgaccgcttgagacaagaccagcttaaaatcaacggcgtgtgacaaggtattagccgactgatcttggcagtatcctgccagcaattgcaacagcaactgcttaaataaattgttcaagggaaaggtacaatatttacggtcatctttaaaatgcaagttatcttctaagagctggtcaaagtgaatttggtgcagaaattcagcaattaataaagttccggcatcgttcgctaactcaccaccgtcattagaaatgttgatctggtcattgaataaaagtttttcatgatgtaaagttgacataaggagcactcctgttctttgtggttttcatcgattttacaatagcacaggatgtgctctttttgtacacccaacaggtgaaaaacgaaaaagatgcgaactagcatgacaacaacaaaaagtagtccttaagggaaaagtatgaataattcaggatgaaaggtattattctagcaggcggttctgggacacgtttgtatcccatcacacgcgctttatcaaaacaattgattccaatctatgacaaaccaatgatttactatccaatgtcagtgctcatgttggccgggattcaagatattatgattatctcaaccccaactgatacaccacggtttaaagaattatttggcaacggcaatgacttagggttaaacatcgaatacgccgttcaagaacaacccaatggtttggcagaggctttcgtgattggggcggacttcatcggcgatgattcagtatgcttaatcttaggtgacaacatctattatggtggtggcctttcagaaatgctccaaagagcggctcaaaaagaatcaggcgcaaccgtttttggttatcatgtgaatgatccagaacgctttggcgttgttgattttgatgaaaatatgcatgctaaatcaatcgttgaaaagccagaacatccggcaagtaactatgcggtgactgggttatacttctacgacaaccaagttgtcgacattgcgaagaatattaaaccttcaccacgtggcgaactagaaattacagacatcaacaaagcgtatcttgaaaaaggccagctagatgttgaattaatgggccgtgggtttgcttggttagatactggaacccatgattcattacaagaagccagcagttttattgcgaccgttcaaaaacggcaaaacttgaaagtggcgtgtctagaagaaattgcttaccgcatgcactatatcgataaagcaaaagtgattgaattggcacaaccactcaagaaaaacgactacggtcaatatttattgcgattagtaaaagaagattaggggtaagtaatcatgggtaagttaaaagtcacaacaactaaattacaagacgttaaaattattgaaccagccgtctttggtgatcatcgtggattctttacagaatcttattcagatcgcgatttcaaagaagcgggcatcgatattgatttcattcaagataatcactcactttcaacgcaagcaggtgttttacgaggcttacatttccaacgcggcaaagctgcgcaaacgaaattaattcgcgtagtgactggggctgtcttagatgtcatcgttgacgttcgtgcaggttcaccaacttacaaacaatgggaagggtacatcctttctgccagcaatcaccgtcaattacttgttccaaagggcttcgcccatggctttgtcactttgacggataacgttaacttcttgtataaatgtgatggctactatgatgcagaagctgacggcggtatttcattcaagacaccagaattaaacatggctcctatgatggaattacggacaaactgttcgatataatacatcataaaggagctttttattatggcaattaaatattcaaatgaatttaaagaatcgattgttagcttaagtcagactggccgttcggccaactcactggctaaagaatacaacgtcagtgtttcaacggtcactaagtggattaaacaagctgatcctaacaacactaaagtgctatcatcaaatgaacgtgctctgattaaagaaaataaacggttaaaagaagaacttgatattttaaaacgagcggcggtgctcatggcaaaaagctaattattaaagggcgtgccctcgtgttagaagtcgtcaacgctaatttacttgctgggcaccgcattacgcgtatcttatcagtactcaaaattccgcgctcaacctactatgattatctacattggcagccaagtagaactgaacgccgccggcatttaattaaacaagaagtgttaacggcttggttaagatatccaatgtatggctacccacgattaacgatcttactaaatcaacagtctgatattcacgttagtcagcgtctggtctatcaacaaatgtgtgaattagggattagatctagaatggttaaacgaatcaataagccaaccactcagactgattatgatcagcgaccaaacttgattaagcagttaactgatcaatctggtattttattgactgatattacgtacattccccttaaccatacttggtgttacctagctagtgtctataatccagtaacccgacgggttattgcttaccaacttaatacgcagatgactaaagaactagcgactaacgttattacccaagtcatggcgcaagcagttaaaccacaaattattcatagtgatatgggaagccaatacacaagtgacttatttgaaaacactttatcgaagtatggtatcaagcattcttactcccgaaagggtcagcccggcgataacgcgcgaattgaaagttttcattcaattttgaaacgtgaatacgttaatttccaagattttaagacaattcatgaagcaatcgccggaattgataactatattcgttggtataacagtgatcgtatttcacttgtagcgtagctacaggctattaaattcaataatgttggggcttatttaatatactctaaagcgtttttaaaatctgaacgggactaaaacttcggcctcggcagattgtaaaatttaagttgaacatttaagtggacagaaaaacccatcaaggtctttaatggtgttaccacacaatccattagaaagaaggaccttgatgagcaccactattttatcattccagaaccgtgttgtcattgaaacgcttcataatgaaggacgttccttgcgatacatcgctaactacttaggctttagtaagaccaccatctttaacgaacttcaccggctaaatagtgagtaccaggctgggctagcgcaaactgactttgaacgaaaggttagtcaacgggggcggaagtcttcgctcactaaaaaccttaaacacttgatcgaggaaaagattcaagtccagaagtggtcccctgaacaagttgcccatgtggtggggattgcctacaagacggtctataactggattgatcaaggatggcttgatatacagttgcccgatttgcctgatcatggaattcgtcgtcatcgtgctaaagaaaagcgtggtacgttcaatcacggccgctccattgaggagcggcctcataaagtcgaaactcgccaggaattcggccactttgaagctgataccgtactttctggtaaacgtaaaggtcaagctgtggctacttttgtggagcgtaagagtcgcctgacaattgttaaacggctccatggtcgcgacagtcagtccatgactcaagccgtacttgaactagctagtcaacttcaagacaagctcaagacgcttaccgtagatcatggtaaagagttcgctaactatcagacaattgaacggcgaactggtacacaggtttattttgcccatgcctattcaccgcatgaaagaggcagtaatgagaaccgtaaccgagttttgcggcgctttattcccaaaggccaagccattgaagaactaagtgatcaccaattggttcaaattaattggtatttgaattcacggccacttaaatgtcttaattggcatacaccaatcgagatcttcttgcttaatttacgtcattaaattcgttcaagttatttcttgcaatctgcctctctttagaagaacaatattaatatgacttattgtctaatttttcaataacggtacataaatcaccaaacttggcatttccccacctaacccatataattaaaaaacaatcattgcattgaaaacgtttaacaaggaggacgaccatgcatttagttcaagcatttttactttcattcaccgcattttttgcaattatgaacccctttgctaacttgccaatgttcgtcagtttgactgctgataacagtcgcaaggaaatcaacgcgattgcccgactggcttttatcgtggcgaccgtcatcgtggtactgtttgcctttctcggaaattacatcttcaccatttttggtatcaaccttgctgcactccgcatcatgggcggaatcattttggggttgattggttaccacatgatccaaggtaacgtttcgccgatccagcacgatcccgaaaaatccgttaaggattccgtcaacagtagtaacaccaacgtcgcgatttctccgctagccatgccaattttggccggccccggaaccattgccaccaccatgaacttggctagtggaactaaccccttcatcgtcgtggccgcgttcgttgttttagcagtcattgcttacttcatttttatctacggtgaacaaatcatggacaagctgggcaacaacatcatgaacgtgatcaccaagttaatggggctgattttagcaaccatcggcgtcaaaatgctgatcgtgggtgtacaagccgccttccacctttaaaataaaaacgcacccccaaagtcggctagttcgtgagcattaacaaggaatcgttggttatgcatgaacatggttaccaattacctattaagcgacgcaaactgactttgggagcacgttttggctttattatttgttattttgttcgccatcggcaccgattaaataagtttcaccgattttgcctttggttaaaattgcccaaacggcacttgaatgatcattcgtatgaatccaatcacgcacattttgacctgaaccgtaaagttttggtcgaatcccacttaaaatattggtaatttgacgtggaatgaatttttcaatgtgttggtaaggaccatagttgtttgaacagtttgaaatagttgcttgtaagccaaatgaacggacccaagctcggactaacaagtctgagctcgcctttgatgatgaataagggctacttgggttataacgcgtttcaggcgtgaatttttcaccaacgccttcgccgtgtcctggtaagtcttcacgcaatggtaaatcaccgtatacttcatcggttgaaacgtggtgataacgcacattatacttgcgacatgcttcaatcaacgtatatgagccgataatgttcgtttgaataaaaggtgaaggatcctttagagagttatcgttgtgactttcggcagcatagtgtacaactgcgtctgtcttttgaactaacttatcgactaattcagcgtcacagatatcgccaacaactaattccacacggtctgctggtaaaccggctaagttagcgcgattgccagcgtaagttaatttatctaaaaccgtcacgtgaacttctgggtggttattcaccacataatgcacgaagttagaaccgataaagccggccccaccagtaacaataatatttttcatagtgtgtcgatctccttaaatttcaccgtaaacaaacggattatctttttcaaattcagtaaaggttggttggttggcatctttttcagacgtaattgcttggtcaaaatcaattggccaatcaattgttttgttcgccgtcggcaccgattaaataagtttcaccgattttgcctttggttaggattgcccatacggcgcttgagtgatcattcgtatgaatccaatcacgcacattttgacctgaaccgtaaagttttggtcgaatcccacttaaaatattggtaatttgacggggaatgaatttttcaatgtgttgataaggaccgtagttatttgaacagtttgaaatggttgcttgtaggccgaatgaacgcacccatgcccggactaacaagtctgagctcgcctttgatgatgaataaggactacttgggttataacgcgtttcaggagtgaatttttcaccaacgccttcgccgtgccctggtaagtcttcacgcaatggtaaatcaccgtatacttcatcggttgaaacgtggtgataacgcacattatacttgcgacaagcttcgatcaacgtatatgaaccgatgatgttcgtttgaataaagggtgaaggatctttcaaagaattatcgttgtgactttcggcagcatagtgtaccactgcgtctgtcttttggactaagcgatccactaattcagcgtcacagatatcgccaacaactaattccacacggtctgctggtaaaccggccaagttcgcacggttcccagcgtaagttaatttatctaaaaccgtcacgtgaacttctgggtggttattcaccacataatgcacgaagttagaaccgataaagccggccccaccggtaacaataatatttttcatagtgtgtcgatctccttaaatttcaccgtaaacaaacggattatctttttcaaattcagtaaaggttggttggttagcatcttttttagacgtaattgcttggtcaaaatcaattggccaatcgcaaggcgatattcgcgacaaagatttcatgcgcagcgtcttccaacaagaaaaagtcagcggtgtgattcatttcgccgctttctcaatcgtgcccgaatcgatgcaagcaccacttaaatatttcgacaataacacatacggcatgactgccttactcgaagtgatgaatgaattcgacgtcaaacacatcgtcttttcatcaacagcggccacttatggggaaccgaaatcaattccaattaaggaatccgacccacaagtcccaactaacccgtatggtgaaagtaaattaatgatggaaacgatgatgaaatgggctgacagagcttacggtattaaattcgttgcattacggtacttcaatgtcgctggtgccaaaccagatggttcaatcggtgaagatcatcacccagaaacccacttgttaccaatcgtgttacaagtggctgctggcaaacgtgaacaactctccatctttggtgatgattatgatacaccagatggcactaacgtccgcgactatgtccacgtgttagacttagccgacgcccatattttggccctcggttacctcgaagaaggccatgatagtaacgcctttaacttaggctcatcaactggtttttcaaatatggaaattgtcgaagccgctcgcaaagtgactggcaaggcaattcctgtgacaatggcaccgcgtcgtgctggtgatccaagtactttgattgccgcaagtgacaaagcacgcgaagtcttaggttggacgccacagtatgacaatatggaagcaattattgaaactgcctggaattggcatttaaatcatcctcgggaaaacaggattcgaacctgcgaccccctggtcccaaaccaggtgctctaccaagctgagctatttcccgttatatgcacccagtaggagtcgaacctacaaccttctgattcgtagtcagacactctatccagttgcgctatgggtgcatttttcattatgatgccgaggaccggaatcgaaccggtacggtagtcacctaccgcgggattttaagtcccgtgcgtctgccagttccgccaccccggcttaatcataatgaaagcggaagacgggattcgaacccgcgacccccaccatggcaaggtgatgttctaccactgaactacttccgcatcttaatgccgactagacgattcgaacgcccgaccctctgattacaaatcagatgctctaccaactgagctaagtcggcataataagataactttcattgaatattcaattgaatgcgggtgaagggacttgaacccccacgtctatatagacactagaacctaaatctagcgcgtctgccaattccgccacacccgcattttggcgtgtaacttggccgatgagtcgtgacaggctcgaactgtcgaccctctgattaaaagtcagatgctctaccaactgagctaacgactcaatggaggttacagggctcgaacctgtgaccctctgcttgtaaggcagacgctctcccaactgagctaaacctccatcaataaaaaattaactattagtattcaaaagaaccatggtattaacgcaacaaaaaaagccctatctctaaggctttttaaaactgtataatgttcaattataccggtgatcggggtcgaaccgatacttccgtgaggaaacgggattttgaatcccgcgcgtctgccaattccgccacaccggcattttgaccaattaaggttagcgcctaaacgcaaaggcggtaaccggatttgaaccggtgataaaggttttgcagacctctgccttaccacttggctataccgccataaaagaacaaatcctgtcccttaaaaagtaaattgggctagctggattcgaaccagcgcatgacaggatcaaaacctgttgccttaccgcttggccatagcccaagaataaaggcggtatgtgggaatcgaacccacgtatgtcggatccacaaaccgatgtgttaaccacttcaccaataccgccatcattaacatgaataattatactacattcacacataatatgcaagctataatataaacagggatagtaggaattgaacccacactgacggttttggagaccgtagttctacctttaaactatatccctaaaaaatatggaggagagtggattcgaaccaccgaacccgaaggagcggatttacagtccgccgcgtttagccacttcgctactcctccaaaataaaattaaaggagtgataggcattgtgaaactaatacattcaaagtacggctacgaaacacctgaatggacggcagcagatgcccgtttagagaagtggcttaaacagaagaagatagatgagaaacgtcgttcagataatgagcggcgtattttattggagaaaaacaattataagaaggagggcggtgctatgtaatgcatgatgaatcaagaaatgatgcaaaggaagactatttatctgggatgaagtacaaagacatcgctgataaatatgatgtgtcgattaataccgtgaaatcatggaaacagcgtaatggatgggaacgtgggccaaataaaaaagcggtgcaccccaaaagcaaaaagggtgcacacaaagttgaaaaggttgcacccaaaatagtgaaggaattatctgctaatgatgggttaaacgatcaacagaaaatgttctgcttgtactatctgcaacgattcaatgccacatgggcttatatgcaagcttatgacgttgattacaagaccgctaatgtaaatggcccaaggttgctagtaaatgctagtgtgcgtgagcaaattgataagctgcgtaacgagattgctaacgacctattcgttacagctgatgatatcgctaaagagtacgctaaacaagcattcgctgatattggcgattacgtagaggtacaatagttgtgctaacaaatccatcataattatcaatttgattaatatattctgctatgttccctttatatgtttgtacttgactaagtacaccttctttttctaaatattccttaatcttaccctctgctattgttgatgttgcaataccactaccacaaacaatcattaattttttcattgcgtttcactccttattttttaattaactttaactagctttttacttctaaatttgttgtaccagaccataattgctaaagtaactattccaattatcccgatacctccccaactcattatcttacccagtcccacaataacccaagttgtccaaacaccaccatcgctgagcactgaaattgatgaattcccttgcattgcgaaatgtgcggctttggctgactgcgttactaacggtgctacccatgaagcgatataaagacttgcaacaatattaacaatgcccccaataattgttctaaaaatatcaccgcggaaaacagctgccattacagcaatcatatatggtaaagttgctaaatcaccaaatggtaaaacagaattgcctggcgtgataactgcaataatcaatgttaatggcactagaattaaagctgatgatagaacacgaattaaaatcgaaaccttttgtgaactagggctgtccaatatccaaatgggcgttcggattaattttacaatctaccataagcctaccgattttttaatattattttattcatcaatttccggcgccgacccaagctctgcctgaatcatccagattttcttctcaattgcggttttgagaccaatgaaaatatcttgggtactgaagtctttttcaacatcggatacttcaatgccgtgttggtaaaggtcttccaagtaacgatagccatcaactaagtgtgcgaggcgttctggggttattttgtcccattcaccaggccagtcttgaatcttagtgttttcggccatttcttttaaggtcgagtaaggactgccatcaagcgcaatcagccgttcagaaatgacatcgagttggctgtcaatttcttccatgaactcatccatcaaggggtgcaacttcaaaaagttgggtccacgcatgtaccaatgcgtctgatggataatcattgacatctggctcaaatcggcaacgagttgatttaatactgctttggttttcgtatatttcattagattgatctcctttcgatatggttattgtttagagccttagccgttctattaggggctttgatggcccatagaagtcgggtcttacgttctacgaatgtaaccagacatgatcgtgactcacttcgactagaaagcaccgtatctacttcccaatgaccaaaagctaaccgttgattaacagttgttggccgttgttcgatggaagtcccacttgtaaatttcccacgattttcgctcactcggtgctggcggacattccgattgggtagatcagtcaatttgaaggggagccagccacgattaagccaattataaattgacgcagtgctcaagttataagcggccgcaatggtttctggtgaccaggttaatcgtaagtgattggtaattaaagtcgctaatgctgccgtcagcatcgaacgacgaccgcaattccgccttttgcgatctgcatcttgctgagctaattctggatcataaggtttaactcggtccaactcatagctaatcgtagctttggcgacgcctaaggcgtcagccattacttggtaagatttattcccctcattgaccagttgtgctagtgcgccacgttgaaaacgtgataaagtagatgtaattgcgggagtagggtttgaacctacgaccttcgggttatgagcccgacgagctaccagactgctccatcccgcgataatataaaggagaatgagagattcgaactctcgcgtgggcagaacccacctgacggttttcaagaccgttcccttcagccagacttgggtaattctccataaaacatataaaatgtaacattgttacaatgacccgtacgggatttgaacccatgataccgccgtgaaagggcggtgtcttaaccacttgaccaacgggccatacaaaacggagaaggagggatttgaaccctcgcgccagtttcccgacctacacccttagcaggggcgcctcttcagccacttgagtacttctccatattatttagataatgggcctaaatggactcgaaccatcgacctcacgcttatcaggcgtgcgctctaaccagctgagctataggcccatgaaaagcgggtgacgagaatcggactcgcgacaacagcttggaaggctgtggttttaccactaaactacacccgcatattcatgatttacacaagatgtactagaataaagaaaaacaagaagaatgaccgtagcaacgggcaaaggtttatctttttttaataaaaatagcgctatcataaacataaggaggaaaatatgactggttatatgaatcagatattgaatgctttgttaaagaatggagattacatgacagcaaatgaattggccgatgtagttgccgtatctcaaaaaacgatttacaggtcggttaaatcgataaatgagacttataaaatgactttagtagaatcggagcatggaagaggctatttgttaaattaccagaattatttacaaataatgaagcaaactcacgaaaaagattatgtcgcattctcgccagttgagagacgaaatgtaattatattaagttgtctattcaatgcaccattcacgaaaagtatagaaaatttataccataagttttatgtgagtgaaacattgattcgacaagaggctcctatgtcaagaatccggacataaaagtacgaacaaatttgactttcaatttaaattacttaatttaggtcgggaccatctggcaatggcaacatatttgggagactgagggtgctgatgccttatatcgttccaaaggacggcaaacaattatgtcagctgataaacaatcaaaaaaacggcaacaaacagagttagaacgtcttagagaagaaaatgaattgctacaaatcgagaatgaatacctaaaaaaattaagagccttagtccaggaagaagaaaacaacaagcgcaagtcatccaagagctaaggcttaaacacaaactagtaaaaattctaaaaatagttggtatggccaaaagtacgtatgaatacattattagtcatgaaccgaacggttcatctgaccaatctgttaaacaaaccatccaaataatcaagaagaatcatccagcgtacggttatcgtcgtgtaactggtgaattacatcgtatgaatatcttagtaaatcataaaaaagtacttgtcttaatgcgagaactgcaattactatcaactgcatttaacaaacgt
